(19) United States
(12) Patent Application Publication
(10) Pub. No.: US 2025/0109389 A1
(43) Pub. Date: Apr. 3, 2025

(54) FUSION PROTEINS, COMPOSITIONS COMPRISING THE SAME, AND METHODS OF USE THEREOF

(71) Applicant: Pairwise Plants Services, Inc., Durham, NC (US)

(72) Inventors: Nathaniel Allen Wesley, Durham, NC (US); Joseph Matthew Watts, Cary, NC (US)

(21) Appl. No.: 18/897,491

(22) Filed: Sep. 26, 2024

Related U.S. Application Data
(60) Provisional application No. 63/585,320, filed on Sep. 26, 2023.
(60) Provisional application No. 63/610,011, filed on Dec. 14, 2023.

(51) Int. Cl. C12N 9/22; C12N 9/12; C12N 9/80; C12N 15/11; C12N 15/62

(52) U.S. Cl. CPC C12N 9/22; C12N 9/1276; C12N 9/80; C12N 15/111; C12N 15/62; C07K 2319/09; C12N 2310/20; C12N 2800/22; C12Y 207/07049; C12Y 305/04004; C12Y 305/04005

(57) ABSTRACT

Described herein are fusion proteins along with compositions and systems comprising a fusion protein. Also described herein are methods of using and/or producing a fusion protein such as methods of using a fusion protein for modifying or editing a target nucleic acid.

### RELATED APPLICATION INFORMATION

[0001] This application claims the benefit of U.S. Provisional Patent Application Ser. No. 63/585,320, filed Sep. 26, 2023, and U.S. Provisional Patent Application Ser. No. 63/610,011, filed Dec. 14, 2023, the disclosures of each of which are incorporated herein by reference in their entirety.

### STATEMENT REGARDING ELECTRONIC FILING OF A SEQUENCE LISTING

[0002] A Sequence Listing in XML format, entitled 1499-137WO_ST26.xml, 734,720 bytes in size, generated on Sep. 25, 2024, and filed herewith, is hereby incorporated by reference in its entirety for its disclosures.

### FIELD

[0003] This invention relates to fusion proteins along with compositions and systems comprising the same, and methods of use thereof.

### BACKGROUND

[0004] Certain base editing systems can convert single C·G to T·A base pairs using cytosine base editors (CBEs) and rewrite single or multiple bases through the reverse-transcriptase activity of RNA-template REDRAW editors. In addition, adenine base editors (ABEs) may convert single A·T to C·G base pairs. New base editors may be advantageous.

### SUMMARY OF THE INVENTION

[0005] A first aspect of the present invention is directed to a fusion protein comprising a CRISPR-Cas effector protein and a polypeptide that has at least about 70%, 75%, 80%, 85%, 90%, 95%, 96%, 97%, 98%, 99%, or 100% sequence identity to one or more of SEQ ID NOs:241-242.

[0006] A further aspect of the present invention is directed to a fusion protein comprising: an adenosine deaminase; a CRISPR-Cas effector protein; and a polypeptide that has at least about 70%, 75%, 80%, 85%, 90%, 95%, 96%, 97%, 98%, 99%, or 100% sequence identity to one or more of SEQ ID NOs:241-242.

[0007] An additional aspect of the present invention is directed to a fusion protein comprising: a cytosine deaminase; a CRISPR-Cas effector protein; and a polypeptide that has at least about 70%, 75%, 80%, 85%, 90%, 95%, 96%, 97%, 98%, 99%, or 100% sequence identity to one or more of SEQ ID NOs:241-242.

[0008] Another aspect of the present invention is directed to a fusion protein having an amino acid sequence comprising at least 70%, 75%, 80%, 85%, 90%, 95%, 96%, 97%, 98%, 99%, or 100% sequence identity to one or more of SEQ ID NOs:243-256, 288-292, and/or 308.

[0009] A further aspect of the present invention is directed to a polynucleotide having a sequence comprising at least 70%, 75%, 80%, 85%, 90%, 95%, 96%, 97%, 98%, 99%, or 100% sequence identity to one or more of SEQ ID NOs:266-279, 294-298, and/or 307.

[0010] An additional aspect of the present invention is directed to a complex comprising a fusion protein of the present invention and a guide nucleic acid.

[0011] A further aspect of the present invention is directed to a nucleic acid encoding a fusion protein of the present invention.

[0012] Another aspect of the present invention is directed to an expression cassette codon optimized for expression in an organism, the expression cassette comprising a polynucleotide encoding a promoter sequence, and a polynucleotide encoding a fusion protein of the present invention, which may be codon-optimized for expression in the organism.

[0013] A further aspect of the present invention is directed to a method of modifying a target nucleic acid in a cell, the method comprising introducing an expression cassette and/or vector of the present invention into the cell, thereby modifying the target nucleic acid in the cell.

[0014] An additional aspect of the present invention is directed to a method for producing a fusion protein of the present invention, the method comprising culturing a cell or group of cells that have been transformed with a nucleic acid encoding the fusion protein; and isolating the fusion protein, thereby producing the fusion protein.

[0015] Another aspect of the present invention is directed a method of modifying a target nucleic acid, the method comprising contacting the target nucleic acid with a fusion protein of the present invention and a guide nucleic acid, thereby modifying the target nucleic acid.

[0016] It is noted that aspects of the invention described with respect to one embodiment, may be incorporated in a different embodiment although not specifically described relative thereto. That is, all embodiments and/or features of any embodiment can be combined in any way and/or combination. Applicant reserves the right to change any originally filed claim and/or file any new claim accordingly, including the right to be able to amend any originally filed claim to depend from and/or incorporate any feature of any other claim or claims although not originally claimed in that manner. These and other objects and/or aspects of the present invention are explained in detail in the specification set forth below. Further features, advantages and details of the present invention will be appreciated by those of ordinary skill in the art from a reading of the figures and the detailed description of the preferred embodiments that follow, such description being merely illustrative of the present invention.

### BRIEF DESCRIPTION OF THE DRAWINGS

[0017] FIG. 1A is a schematic illustrating an exemplary fusion protein according to some embodiments of the present invention.

[0018] FIG. 1B is a schematic illustrating another exemplary fusion protein according to some embodiments of the present invention.

[0019] FIG. 2 is a graph of showing the percentage of A to G editing for an exemplarily fusion protein comprising SEQ ID NO:244 (“Fusion Protein 1”) and for a control protein at various sites for different target nucleic acids.

[0020] FIG. 3 is a graph of showing the percentage of A to G editing for another exemplarily fusion protein comprising SEQ ID NO:243 (“Fusion Protein 2”) and for a control protein at various sites for different target nucleic acids.

[0021] FIG. 4 is a graph showing the log? (fold-change) for exemplarily Fusion Protein 1 and Fusion Protein 2 at the various sites for different target nucleic acids of FIG. 2 and FIG. 3.

[0022] FIG. 5 is a graph of showing the percentage of A to G editing for an exemplarily fusion protein comprising SEQ ID NO:246 (“Fusion Protein 3”) and for a control protein at various sites for different target nucleic acids.

[0023] FIG. 6 is a graph of showing the percentage of A to G editing for another exemplarily fusion protein comprising SEQ ID NO:245 (“Fusion Protein 4”) and for a control protein at various sites for different target nucleic acids.

[0024] FIG. 7 is a graph showing the log 2 (fold-change) for exemplarily Fusion Protein 3 and Fusion Protein 4 at the various sites for different target nucleic acids of FIG. 5 and FIG. 6.

[0025] FIG. 8 is a graph showing editing efficiency using a 1% or 10% editing strength(ES) cutoff for different proteins in corn including exemplarily fusion proteins according to some embodiments of the present invention. Editing strength is the highest edited event reported and is provided in a percentage.

[0026] FIG. 9 is a graph showing the percentage of A to G editing for an exemplarily fusion protein comprising SEQ ID NO:244 (“Fusion Protein 1”) and for a control protein at various sites for different target nucleic acids. (n=3-4 mean±s.e.m.). A statistically significant increase in editing relative to control is indicated with asterisks (Unpaired Student's t-test, * p<0.05, ** p<0.01, *** p<0.001).

[0027] FIG. 10 is a graph showing the percentage of A to G editing for an exemplarily fusion protein comprising SEQ ID NO:246 (“Fusion Protein 3”) and for a control protein at various sites for different target nucleic acids. (n=3-4mean±s.e.m.). A statistically significant increase in editing relative to control is indicated with asterisks (Unpaired Student's t-test, * p<0.05).

[0028] FIG. 11 is a graph showing the percentage of A to G editing for a fusion protein comprising SEQ ID NO:305 (“Fusion Protein 8”) and for a control protein at various sites for different target nucleic acids. (n=3-4 mean±s.e.m.). A statistically significant increase in editing relative to control is indicated with asterisks (Unpaired Student's t-test, * p<0.05).

### DETAILED DESCRIPTION

[0029] The present invention now will be described hereinafter with reference to the accompanying drawings and examples, in which embodiments of the invention are shown. This description is not intended to be a detailed catalog of all the different ways in which the invention may be implemented, or all the features that may be added to the instant invention. For example, features illustrated with respect to one embodiment may be incorporated into other embodiments, and features illustrated with respect to a particular embodiment may be deleted from that embodiment. Thus, the invention contemplates that in some embodiments of the invention, any feature or combination of features set forth herein can be excluded or omitted. In addition, numerous variations and additions to the various embodiments suggested herein will be apparent to those skilled in the art in light of the instant disclosure, which do not depart from the instant invention. Hence, the following descriptions are intended to illustrate some particular embodiments of the invention, and not to exhaustively specify all permutations, combinations and variations thereof.

[0030] Unless otherwise defined, all technical and scientific terms used herein have the same meaning as commonly understood by one of ordinary skill in the art to which this invention belongs. The terminology used in the description of the invention herein is for the purpose of describing particular embodiments only and is not intended to be limiting of the invention.

[0031] All publications, patent applications, patents and other references cited herein are incorporated by reference in their entireties for the teachings relevant to the sentence and/or paragraph in which the reference is presented.

[0032] Unless the context indicates otherwise, it is specifically intended that the various features of the invention described herein can be used in any combination. Moreover, the present invention also contemplates that in some embodiments of the invention, any feature or combination of features set forth herein can be excluded or omitted. To illustrate, if the specification states that a composition comprises components A, B and C, it is specifically intended that any of A, B or C, or a combination thereof, can be omitted and disclaimed singularly or in any combination.

[0033] As used in the description of the invention and the appended claims, the singular forms “a,” “an” and “the” are intended to include the plural forms as well, unless the context clearly indicates otherwise.

[0034] Also as used herein, “and/or” refers to and encompasses any and all possible combinations of one or more of the associated listed items, as well as the lack of combinations when interpreted in the alternative (“or”).

[0035] The term “about,” as used herein when referring to a measurable value such as an amount or concentration and the like, is meant to encompass variations of ±10%, ±5%, ±1%, ±0.5%, or even ±0.1% of the specified value as well as the specified value. For example, “about X” where X is the measurable value, is meant to include X as well as variations of ±10%, ±5%, ±1%, ±0.5%, or even ±0.1% of X. A range provided herein for a measurable value may include any other range and/or individual value therein.

[0036] As used herein, phrases such as “between X and Y” and “between about X and Y” should be interpreted to include X and Y. As used herein, phrases such as “between about X and Y” mean “between about X and about Y” and phrases such as “from about X to Y” mean “from about X to about Y.”

[0037] Recitation of ranges of values herein are merely intended to serve as a shorthand method of referring individually to each separate value falling within the range, unless otherwise indicated herein, and each separate value is incorporated into the specification as if it were individually recited herein. For example, if the range 10 to 15 is disclosed, then 11, 12, 13, and 14 are also disclosed.

[0038] The term “comprise,” “comprises” and “comprising” as used herein, specify the presence of the stated features, integers, steps, operations, elements, and/or components, but do not preclude the presence or addition of one or more other features, integers, steps, operations, elements, components, and/or groups thereof.

[0039] As used herein, the transitional phrase “consisting essentially of” means that the scope of a claim is to be interpreted to encompass the specified materials or steps recited in the claim and those that do not materially affect the basic and novel characteristic(s) of the claimed invention. Thus, the term “consisting essentially of” when used in a claim of this invention is not intended to be interpreted to be equivalent to “comprising.”

[0040] As used herein, the terms “increase,” “increasing,” “enhance,” “enhancing,” “improve” and “improving” (and grammatical variations thereof) describe an elevation of at least about 5%, 10%, 15%, 20%, 25%, 30%, 35%, 40%, 45%, 50%, 55%, 60%, 65%, 70%, 75%, 80%, 85%, 90%, 95%, 100%, 150%, 200%, 300%, 400%, 500% or more such as compared to another measurable property or quantity (e.g., a control value).

[0041] As used herein, the terms “reduce,” “reduced,” “reducing,” “reduction,” “diminish,” and “decrease” (and grammatical variations thereof), describe, for example, a decrease of at least about 5%, 10%, 15%, 20%, 25%, 30%, 35%, 40%, 45%, 50%, 55%, 60%, 65%, 70%, 75%, 80%, 85%, 90%, 95%, 97%, 98%, 99%, or 100% such as compared to another measurable property or quantity (e.g., a control value). In some embodiments, the reduction can result in no or essentially no (i.e., an insignificant amount, e.g., less than about 10% or even 5%) detectable activity or amount.

[0042] A “heterologous nucleotide sequence” or a “recombinant nucleotide sequence” is a nucleotide sequence not naturally associated with a host cell into which it is introduced, including non-naturally occurring multiple copies of a naturally occurring nucleotide sequence.

[0043] A “native” or “wild-type” nucleic acid, nucleotide sequence, polypeptide or amino acid sequence refers to a naturally occurring or endogenous nucleic acid, nucleotide sequence, polypeptide or amino acid sequence. Thus, for example, a “native nucleic acid” is a nucleic acid that is naturally occurring in or endogenous to a reference organism. A “homologous” nucleic acid sequence is a nucleotide sequence naturally associated with a host cell into which it is introduced.

[0044] As used herein, the terms “nucleic acid,” “nucleic acid molecule,” “nucleotide sequence” and “polynucleotide” refer to RNA or DNA that is linear or branched, single or double stranded, or a hybrid thereof. The term also encompasses RNA/DNA hybrids. When dsRNA is produced synthetically, less common bases, such as inosine, 5-methylcytosine, 6-methyladenine, hypoxanthine and others can also be used for antisense, dsRNA, and ribozyme pairing. For example, polynucleotides that contain C-5 propyne analogues of uridine and cytidine have been shown to bind RNA with high affinity and to be potent antisense inhibitors of gene expression. Other modifications, such as modification to the phosphodiester backbone, or the 2′-hydroxy in the ribose sugar group of the RNA can also be made.

[0045] As used herein, the term “nucleotide sequence” refers to a heteropolymer of nucleotides or the sequence of these nucleotides from the 5′ to 3′ end of a nucleic acid molecule and includes DNA or RNA molecules, including cDNA, a DNA fragment or portion, genomic DNA, synthetic (e.g., chemically synthesized) DNA, plasmid DNA, mRNA, and anti-sense RNA, any of which can be single stranded or double stranded. The terms “nucleotide sequence” “nucleic acid,” “nucleic acid molecule,” “nucleic acid construct,” “recombinant nucleic acid,” “oligonucleotide” and “polynucleotide” are also used interchangeably herein to refer to a heteropolymer of nucleotides. Nucleic acid molecules and/or nucleotide sequences provided herein are presented herein in the 5′ to 3′ direction, from left to right and are represented using the standard code for representing the nucleotide characters as set forth in the U.S. sequence rules, 37 CFR §§ 1.831-1.835 and the World Intellectual Property Organization (WIPO) Standard ST.26. A “5′ region” as used herein can mean the region of a polynucleotide that is nearest the 5′ end of the polynucleotide. Thus, for example, an element in the 5′ region of a polynucleotide can be located anywhere from the first nucleotide located at the 5′ end of the polynucleotide to the nucleotide located halfway through the polynucleotide. A “3′ region” as used herein can mean the region of a polynucleotide that is nearest the 3′ end of the polynucleotide. Thus, for example, an element in the 3′ region of a polynucleotide can be located anywhere from the first nucleotide located at the 3′ end of the polynucleotide to the nucleotide located halfway through the polynucleotide.

[0046] As used herein, the term “gene” refers to a nucleic acid molecule capable of being used to mRNA, RNA, miRNA, produce antisense anti-microRNA antisense oligodeoxyribonucleotide (AMO) and the like. Genes may or may not be capable of being used to produce a functional protein or gene product. Genes can include both coding and non-coding regions (e.g., introns, regulatory elements, promoters, enhancers, termination sequences and/or 5′ and 3′ untranslated regions).

[0047] A polynucleotide, gene, or polypeptide may be “isolated” by which is meant a nucleic acid or polypeptide that is substantially or essentially free from components normally found in association with the nucleic acid or polypeptide, respectively, in its natural state. In some embodiments, such components include other cellular material, culture medium from recombinant production, and/or various chemicals used in chemically synthesizing the nucleic acid or polypeptide.

[0048] The term “mutation” refers to point mutations (e.g., missense, or nonsense, or insertions or deletions of single base pairs that result in frame shifts), insertions, deletions, and/or truncations. When the mutation is a substitution of a residue within an amino acid sequence with another residue, or a deletion or insertion of one or more residues within a sequence, the mutations are typically described by identifying the original residue followed by the position of the residue within the sequence and by the identity of the newly substituted residue.

[0049] As used herein, a “non-natural mutation” refers to a mutation that is generated through human intervention and differs from mutations found in the same gene or polypeptide that have occurred in nature (e.g., occurred naturally and not as a result of a modification made by a human).

[0050] The terms “complementary” or “complementarity,” as used herein, refer to the natural binding of polynucleotides under permissive salt and temperature conditions by base-pairing. For example, the sequence “A-G-T” (5′ to 3′) binds to the complementary sequence “T-C-A” (3′ to 5′). Complementarity between two single-stranded molecules may be “partial,” in which only some of the nucleotides bind, or it may be complete when total complementarity exists between the single stranded molecules. The degree of complementarity between nucleic acid strands has significant effects on the efficiency and strength of hybridization between nucleic acid strands.

[0051] “Complement” as used herein can mean 100% complementarity with the comparator nucleotide sequence or it can mean less than 100% complementarity (e.g., “substantially complementary,” such as about 70%, 71%, 72%, 73%, 74%, 75%, 76%, 77%, 78%, 79%, 80%, 81%, 82%, 83%, 84%, 85%, 86%, 87%, 88%, 89%, 90%, 91%, 92%, 93%, 94%, 95%, 96%, 97%, 98%, 99%, and the like, complementarity).

[0052] A “portion” or “fragment” of a nucleotide sequence or polypeptide (including a domain) will be understood to mean a nucleotide sequence or polypeptide of reduced length (e.g., reduced by 1, 2, 3, 4, 5, 6, 7, 8, 9, 10, 11, 12, 13, 14, 15, 16, 17, 18, 19, 20 or more residue(s) (e.g., nucleotide(s) or peptide(s)) relative to a reference nucleotide sequence or polypeptide, respectively, and comprising, consisting essentially of and/or consisting of a nucleotide sequence or polypeptide of contiguous residues, respectively, identical or almost identical (e.g., 70%, 71%, 72%, 73%, 74%, 75%, 76%, 77%, 78%, 79%, 80%, 81%, 82%, 83%, 84%, 85%, 86%, 87%, 88%, 89%, 90%, 91%, 92%, 93%, 94%, 95%, 96%, 97%, 98%, 99% identical) to the reference nucleotide sequence or polypeptide. In some embodiments, a portion of a reference nucleotide sequence or polypeptide is about 5%, 10%, 15%, 20%, 25%, 30%, 35%, 40%, 45%, 50%, 55%, 60%, 65%, 70%, 75%, 80%, 85%, 90%, 95%, 97%, 98%, 99%, or more of the full-length reference nucleotide sequence or polypeptide. Such a nucleic acid fragment or portion according to the invention may be, where appropriate, included in a larger polynucleotide of which it is a constituent. As an example, a repeat sequence of guide nucleic acid of this invention may comprise a portion of a wild-type CRISPR-Cas repeat sequence (e.g., a wild-type Type V CRISPR Cas repeat, e.g., a repeat from the CRISPR Cas system that includes, but is not limited to, Cas12a (Cpf1), Cas12b, Cas12c (C2c3), Cas12d (CasY), Cas12c (CasX), Cas12g, Cas12h, Cas12i, C2c1, C2c4, C2c5, C2c8, C2c9, C2c10, Cas14a, Cas14b, and/or Cas14c, and the like). Similarly, a portion of a polypeptide may be included in a larger polypeptide of which it is a constituent.

[0053] Different nucleic acids or proteins having homology are referred to herein as “homologues.” The term homologue includes homologous sequences from the same and other species and orthologous sequences from the same and other species. “Homology” refers to the level of similarity between two or more nucleic acid and/or amino acid sequences in terms of percent of positional identity (i.e., sequence similarity or identity). Homology also refers to the concept of similar functional properties among different nucleic acids or proteins. Thus, the compositions and methods of the invention further comprise homologues to the nucleotide sequences and polypeptides of this invention. “Orthologous” and “orthologs” as used herein, refers to homologous nucleotide sequences and/or amino acid sequences in different species that arose from a common ancestral gene during speciation. A homologue or ortholog of a nucleotide sequence of this invention has a substantial sequence identity (e.g., at least about 70%, 71%, 72%, 73%, 74%, 75%, 76%, 77%, 78%, 79%, 80%, 81%, 82%, 83%, 84%, 85%, 86%, 87%, 88%, 89%, 90%, 91%, 92%, 93%, 94%, 95%, 96%, 97%, 98%, 99%, 99.5% or 100%) to said nucleotide sequence of the invention.

[0054] As used herein “sequence identity” refers to the extent to which two optimally aligned polynucleotide or polypeptide sequences are invariant throughout a window of alignment of components, e.g., nucleotides or amino acids. “Identity” can be readily calculated by known methods including, but not limited to, those described in: Computational Molecular Biology (Lesk, A. M., cd.) Oxford University Press, New York (1988); Biocomputing: Informatics and Genome Projects (Smith, D. W., ed.) Academic Press, New York (1993); Computer Analysis of Sequence Data, Part I (Griffin, A. M., and Griffin, H. G., eds.) Humana Press, New Jersey (1994); Sequence Analysis in Molecular Biology (von Heinje, G., ed.) Academic Press (1987); and Sequence Analysis Primer (Gribskov, M. and Devereux, J., eds.) Stockton Press, New York (1991).

[0055] As used herein, the term “percent sequence identity” or “percent identity” refers to the percentage of identical nucleotides in a linear polynucleotide sequence of a reference (“query”) polynucleotide molecule (or its complementary strand) as compared to a test (“subject”) polynucleotide molecule (or its complementary strand) when the two sequences are optimally aligned. In some embodiments, “percent identity” can refer to the percentage of identical amino acids in an amino acid sequence as compared to a reference polypeptide.

[0056] As used herein, the phrase “substantially identical,” or “substantial identity” in the context of two nucleic acid molecules, nucleotide sequences or protein sequences, refers to two or more sequences or subsequences that have at least about 70%, 71%, 72%, 73%, 74%, 75%, 76%, 77%, 78%, 79%, 80%, 81%, 82%, 83%, 84%, 85%, 86%, 87%, 88%, 89%, 90%, 91%, 92%, 93%, 94%, 95%, 96%, 97%, 98%, 99%, 99.5% or 100% nucleotide or amino acid residue identity, when compared and aligned for maximum correspondence, as measured using one of the following sequence comparison algorithms or by visual inspection. In some embodiments of the invention, the substantial identity exists over a region of consecutive nucleotides of a nucleotide sequence of the invention that is about 10 nucleotides to about 20 nucleotides, about 10 nucleotides to about 25 nucleotides, about 10 nucleotides to about 30 nucleotides, about 15 nucleotides to about 25 nucleotides, about 30 nucleotides to about 40 nucleotides, about 50 nucleotides to about 60 nucleotides, about 70 nucleotides to about 80 nucleotides, about 90 nucleotides to about 100 nucleotides, or more nucleotides in length, and any range therein, up to the full length of the sequence. In some embodiments, the nucleotide sequences can be substantially identical over at least about 20 nucleotides (e.g., about 20, 21, 22, 23, 24, 25, 26, 27, 28, 29, 30, 31, 32, 33, 34, 35, 36, 37, 38, 39, 40 nucleotides). In some embodiments, a substantially identical nucleotide or protein sequence performs substantially the same function as the nucleotide (or encoded protein sequence) to which it is substantially identical.

[0057] For sequence comparison, typically one sequence acts as a reference sequence to which one or more test sequence(s) are compared. When using a sequence comparison algorithm, test and reference sequences are entered into a computer, subsequence coordinates are designated if necessary, and sequence algorithm program parameters are designated. The sequence comparison algorithm then calculates the percent sequence identity for the test sequence(s) relative to the reference sequence, based on the designated program parameters.

[0058] Optimal alignment of sequences for aligning a comparison window are well known to those skilled in the art and may be conducted by tools such as the local homology algorithm of Smith and Waterman, the homology alignment algorithm of Needleman and Wunsch, the search for similarity method of Pearson and Lipman, and optionally by computerized implementations of these algorithms such as GAP, BESTFIT, FASTA, and TFASTA available as part of the GCG® Wisconsin Package® (Accelrys Inc., San Diego, CA) as well as web-based alignment programs such as Clustal Omega, EMBOSS Needle, EMBOSS Stretcher, EMBOSS Water, LALIGN, GGSEARCH2SEQ, EMBOS Cons, Kalign, MAFFT, MUSCLE, and T-Coffee. In some embodiments, an “optimal alignment” of two sequences (e.g., two polypeptide sequences or two polynucleotide sequences) is the highest scoring alignment, optionally from an alignment conducted by a tool such as the local homology algorithm of Smith and Waterman, the homology alignment algorithm of Needleman and Wunsch, the search for similarity method of Pearson and Lipman, GAP, BESTFIT, FASTA, and TFASTA available as part of the GCG® Wisconsin Package® (Accelrys Inc., San Diego, CA), Clustal Omega, EMBOSS Needle, EMBOSS Stretcher, EMBOSS Water, LALIGN, GGSEARCH2SEQ, EMBOS Cons, Kalign, MAFFT, MUSCLE, and/or T-Coffee. In some embodiments, an “optimal alignment” of two sequences (e.g., two polypeptide sequences) is the alignment that provides the highest percent sequence identity, optionally allowing for one or more gap(s) to be introduced into one or both sequences. An “identity fraction” for aligned segments of a test sequence and a reference sequence is the number of identical components which are shared by the two aligned sequences divided by the total number of components in the reference sequence segment, e.g., the entire reference sequence or a smaller defined part of the reference sequence. Percent sequence identity is represented as the identity fraction multiplied by 100. The comparison of one or more sequences may be to a full-length sequence or a portion thereof, or to a longer sequence. For purposes of this invention “percent identity” and/or optimal alignment may be determined using Basic Local Alignment Search Tool (BLAST) provided by the National Center for Biotechnology Information such as BLASTX for translated nucleotide sequences, BLASTN for polynucleotide sequences, and BLASTP for polypeptide sequences.

[0059] Two nucleotide sequences may also be considered substantially complementary when the two sequences hybridize to each other under stringent conditions. In some representative embodiments, two nucleotide sequences considered to be substantially complementary hybridize to each other under highly stringent conditions.

[0060] “Stringent hybridization conditions” and “stringent hybridization wash conditions” in the context of nucleic acid hybridization experiments such as Southern and Northern hybridizations are sequence dependent, and are different under different environmental parameters. An extensive guide to the hybridization of nucleic acids is found in Tijssen Laboratory Techniques in Biochemistry and Molecular Biology-Hybridization with Nucleic Acid Probes part I chapter 2 “Overview of principles of hybridization and the strategy of nucleic acid probe assays” Elsevier, New York (1993). Generally, highly stringent hybridization and wash conditions are selected to be about 5° C. lower than the thermal melting point (Tₘ) for the specific sequence at a defined ionic strength and pH.

[0061] The Tₘ is the temperature (under defined ionic strength and pH) at which 50% of the target sequence hybridizes to a perfectly matched probe. Very stringent conditions are selected to be equal to the Tₘ for a particular probe. An example of stringent hybridization conditions for hybridization of complementary nucleotide sequences which have more than 100 complementary residues on a filter in a Southern or northern blot is 50% formamide with 1 mg of heparin at 42° C., with the hybridization being carried out overnight. An example of highly stringent wash conditions is 0.1 5M NaCl at 72° C. for about 15 minutes. An example of stringent wash conditions is a 0.2×SSC wash at 65° C. for 15 minutes (see, Sambrook, infra, for a description of SSC buffer). Often, a high stringency wash is preceded by a low stringency wash to remove background probe signal. An example of a medium stringency wash for a duplex of, e.g., more than 100 nucleotides, is 1×SSC at 45° C. for 15 minutes. An example of a low stringency wash for a duplex of, e.g., more than 100 nucleotides, is 4-6×SSC at 40° C. for 15 minutes. For short probes (e.g., about 10 to 50 nucleotides), stringent conditions typically involve salt concentrations of less than about 1.0 M Na ion, typically about 0.01 to 1.0 M Na ion concentration (or other salts) at pH 7.0 to 8.3, and the temperature is typically at least about 30° C. Stringent conditions can also be achieved with the addition of destabilizing agents such as formamide. In general, a signal to noise ratio of 2× (or higher) than that observed for an unrelated probe in the particular hybridization assay indicates detection of a specific hybridization. Nucleotide sequences that do not hybridize to each other under stringent conditions are still substantially identical if the proteins that they encode are substantially identical. This can occur, for example, when a copy of a nucleotide sequence is created using the maximum codon degeneracy permitted by the genetic code.

[0062] A polynucleotide and/or recombinant nucleic acid construct of this invention can be codon optimized for expression. In some embodiments, a polynucleotide, nucleic acid construct, expression cassette, and/or vector of the present invention (e.g., that comprises/encodes a polypeptide of the present invention (e.g., a fusion protein), a nucleic acid binding polypeptide (e.g., a DNA binding polypeptide such as a sequence-specific DNA binding domain from a polynucleotide-guided endonuclease, a zinc finger nuclease, a transcription activator-like effector nuclease (TALEN), an Argonaute protein, and/or a CRISPR-Cas effector protein), a guide nucleic acid, a deaminase, and/or a reverse transcriptase) may be codon optimized for expression in an organism (e.g., an animal such as a human, a plant, a fungus, an archacon, or a bacterium). In some embodiments, the codon optimized nucleic acid constructs, polynucleotides, expression cassettes, and/or vectors of the invention have about 70% to about 99.9% (e.g., 70%, 71%, 72%, 73%, 74%, 75%, 76%, 77%, 78%, 79%, 80%, 81%, 82%, 83%, 84%, 85%, 86%, 87%, 88%, 89%, 90%, 91%, 92%, 93%, 94%, 95%, 96%, 97%, 98%, 99%, 99.5%. 99.9% or 100%) identity or more to the reference nucleic acid constructs, polynucleotides, expression cassettes, and/or vectors but which have not been codon optimized.

[0063] In any of the embodiments described herein, a polynucleotide or nucleic acid construct of the invention may be operatively associated with a variety of promoters and/or other regulatory elements for expression in an organism or cell thereof (e.g., a mammal and/or a mammalian cell, a plant and/or a cell of a plant, etc.). Thus, in some embodiments, a polynucleotide or nucleic acid construct of this invention may further comprise one or more promoters, introns, enhancers, and/or terminators operably linked to one or more nucleotide sequences. In some embodiments, a promoter may be operably associated with an intron (e.g., Ubi1 promoter and intron). In some embodiments, a promoter associated with an intron may be referred to as a “promoter region” (e.g., Ubi1 promoter and intron).

[0064] By “operably linked” or “operably associated” as used herein in reference to polynucleotides, it is meant that the indicated elements are functionally related to each other, and are also generally physically related. Thus, the term “operably linked” or “operably associated” as used herein, refers to nucleotide sequences on a single nucleic acid molecule that are functionally associated. Thus, a first nucleotide sequence that is operably linked to a second nucleotide sequence means a situation when the first nucleotide sequence is placed in a functional relationship with the second nucleotide sequence. For instance, a promoter is operably associated with a nucleotide sequence if the promoter effects the transcription or expression of said nucleotide sequence. Those skilled in the art will appreciate that the control sequences (e.g., promoter) need not be contiguous with the nucleotide sequence to which it is operably associated, as long as the control sequences function to direct the expression thereof. Thus, for example, intervening untranslated, yet transcribed, nucleic acid sequences can be present between a promoter and the nucleotide sequence, and the promoter can still be considered “operably linked” to the nucleotide sequence.

[0065] As used herein, the term “linked,” or “fused” in reference to polypeptides, refers to the covalent attachment of one polypeptide to another. A polypeptide may be linked or fused to another polypeptide (e.g., at the N-terminus or the C-terminus) directly (e.g., via a peptide bond) or through a linker (e.g., a peptide linker). Two polypeptides being directly fused (e.g., a direct linkage) refers to the covalent attachment of one amino acid residue of a first polypeptide of the two polypeptides to an amino acid residue of a second polypeptide of the two polypeptides without an intervening element between the two amino acid residues. For example, first and second polypeptides may be directly linked via a peptide bond between the first and second polypeptides without an intervening element (e.g., a linker) between the first and second polypeptides. Two polypeptides being indirectly fused (e.g., an indirect linkage) refers to an intervening element (e.g., a linker such as a peptide linker) that is present between the two polypeptides and is covalently attached to each, optionally the intervening element may attach one end of a first polypeptide of the two polypeptides to an end of the second polypeptide of the two polypeptides.

[0066] A “fusion protein” as used herein refers to two or more polypeptides that are covalently attached (e.g., directly or indirectly) so that they are transcribed and translated as a single unit and thereby produce a single polypeptide comprising the two or more polypeptides. In some embodiments, the two or more polypeptides may naturally be encoded by separate genes, but, in the form of a fusion protein, are encoded by a single gene. The term “linker” is art-recognized and refers to a chemical group, or a molecule linking two molecules or moieties, e.g., linking two polypeptides or domains of a fusion protein, such as, for example, a CRISPR-Cas effector protein and a peptide tag and/or a polypeptide of interest. A linker may be comprised of a single linking molecule (e.g., a single amino acid) or may comprise more than one linking molecule. In some embodiments, the linker can be an organic molecule, group, polymer, or chemical moiety such as a bivalent organic moiety. In some embodiments, the linker may be an amino acid or it may be a peptide. In some embodiments, the linker is a peptide (e.g., a peptide linker).

[0067] In some embodiments, a peptide linker useful with this invention may be about 2 to about 100 or more amino acids in length, for example, about 2, 3, 4, 5, 6, 7, 8, 9, 10, 11, 12, 13, 14, 15, 16, 17, 18, 19, 20, 21, 22, 23, 24, 25, 26, 27, 28, 29, 30, 31, 32, 33, 34, 35, 36, 37, 38, 39, 40, 41, 42, 43, 44, 45, 46, 47, 48, 49, 50, 51, 52, 53, 54, 55, 56, 57, 58, 59, 60, 61, 62, 63, 64, 65, 66, 67, 68, 69, 70, 71, 72, 73, 74, 75, 76, 77, 78, 79, 80, 81, 82, 83, 84, 85, 86, 87, 88, 89, 90, 91, 92, 93, 94, 95, 96, 97, 98, 99, 100 or more amino acids in length (e.g., about 2 to about 40, about 2 to about 50, about 2 to about 60, about 4 to about 40, about 4 to about 50, about 4 to about 60, about 5 to about 40, about 5 to about 50, about 5 to about 60, about 9 to about 40, about 9 to about 50, about 9 to about 60, about 10 to about 40, about 10 to about 50, about 10 to about 60, or about 2, 3, 4, 5, 6, 7, 8, 9, 10, 11, 12, 13, 14, 15, 16, 17, 18, 19, 20, 21, 22, 23, 24, 25 amino acids to about 26, 27, 28, 29, 30, 31, 32, 33, 34, 35, 36, 37, 38, 39, 40, 41, 42, 43, 44, 45, 46, 47, 48, 49, 50, 51, 52, 53, 54, 55, 56, 57, 58, 59, 60, 61, 62, 63, 64, 65, 66, 67, 68, 69, 70, 71, 72, 73, 74, 75, 76, 77, 78, 79, 80, 81, 82, 83, 84, 85, 86, 87, 88, 89, 90, 91, 92, 93, 94, 95, 96, 97, 98, 99, 100 or more amino acids in length (e.g., about 105, 110, 115, 120, 130, 140 150 or more amino acids in length)). In some embodiments, a peptide linker may be a GS linker. In some embodiments, the peptide linker is a GS linker having 2, 3, or 4 amino acid residues, optionally 2 or 4 amino acid residues. In some embodiments, the peptide linker has one of the amino acid sequences of SEQ ID NOs:1-36. In some embodiments, the peptide linker may comprise an amino acid sequence of CA, CF, (GGS)ₙ, GS, SG, GSSG (SEQ ID NO:31), GSSGSS (SEQ ID NO:32), GSSGSSGS (SEQ ID NO:33), (GSS)ₙ (SEQ ID NO:34), (GSS)ₙGS (SEQ ID NO:35), S (GGS)ₙ (SEQ ID NO:25), SGGS (SEQ ID NO:26), (GSS)ₙG (SEQ ID NO:36), or (GGGGS)n (SEQ ID NO:27), wherein n is an integer of 1-20 (e.g., 1, 2, 3, 4, 5, 6, 7, 8, 9, 10, 11, 12, 13, 14, 15, 16, 17, 18, 19, or 20). In some embodiments, the peptide linker may comprise the amino acid sequence: SGGSGGSGGS (SEQ ID NO:28). In some embodiments, the peptide linker may comprise the amino acid sequence: SGSETPGTSESATPES (SEQ ID NO:29), also referred to as the XTEN linker. In some embodiments, the peptide linker may comprise the amino acid sequence: SGGSSGGSSGSETPGTSESATPESSGGSSGGS (SEQ ID NO:30), also referred to as the GS-XTEN-GS linker. In some embodiments, the linker has a sequence of (GSS)ₙG (SEQ ID NO:36), wherein n is 3. In some embodiments, the linker has a sequence of (GSS)ₙG (SEQ ID NO:36), wherein n is 5.

[0068] As used herein, the term “linked,” or “fused” in reference to polynucleotides, refers to the covalent attachment of one polynucleotide to another polynucleotide. In some embodiments, two or more polynucleotide molecules may be linked by a linker that can be an organic molecule, group, polymer, or chemical moiety such as a bivalent organic moiety. A polynucleotide may be linked or fused to another polynucleotide (at the 5′ end or the 3′ end) via a direct covalent linkage or through one or more linking nucleotides. In some embodiments, a polynucleotide motif of a certain structure may be inserted within another polynucleotide sequence (e.g., extension of the hairpin structure in guide RNA). In some embodiments, the linking nucleotides may be naturally occurring nucleotides. In some embodiments, the linking nucleotides may be non-naturally occurring nucleotides. Two polynucleotides being directly fused (e.g., a direct linkage) refers to the covalent attachment of one nucleotide of a first polynucleotide of the two polynucleotides to a nucleotide of a second polynucleotide of the two polynucleotides without an intervening element between the two polynucleotides. For example, first and second polynucleotides may be directly linked via a phosphodiester bond between the first and second polynucleotides without an intervening element (e.g., a linker) between the first and second polynucleotides. Two polynucleotides being indirectly fused (e.g., an indirect linkage) refers to an intervening element (e.g., a linker such as a polynucleotide linker) that is present between the two polynucleotides and is covalently attached to each, optionally the intervening element attaches one end of a first polynucleotide of the two polynucleotides to an end of the second polynucleotide of the two polynucleotides.

[0069] A “promoter” is a nucleotide sequence that controls or regulates the transcription of a nucleotide sequence (e.g., a coding sequence) that is operably associated with the promoter. The coding sequence controlled or regulated by a promoter may encode a polypeptide and/or a functional RNA. Typically, a “promoter” refers to a nucleotide sequence that contains a binding site for RNA polymerase II and directs the initiation of transcription. In general, promoters are found 5′, or upstream, relative to the start of the coding region of the corresponding coding sequence. A promoter may comprise other elements that act as regulators of gene expression; e.g., a promoter region. These include a TATA box consensus sequence, and often a CAAT box consensus sequence (Breathnach and Chambon, (1981) Annu. Rev. Biochem. 50:349). In plants, the CAAT box may be substituted by the AGGA box (Messing et al., (1983) in Genetic Engineering of Plants, T. Kosuge, C. Meredith and A. Hollaender (eds.), Plenum Press, pp. 211-227). In some embodiments, a promoter region may comprise at least one intron (e.g., SEQ ID NO:37 or SEQ ID NO:38).

[0070] Promoters useful with this invention can include, for example, constitutive, inducible, temporally regulated, developmentally regulated, chemically regulated, tissue-preferred and/or tissue-specific promoters for use in the preparation of recombinant nucleic acid molecules, e.g., “synthetic nucleic acid constructs” or “protein-RNA complex.” These various types of promoters are known in the art.

[0071] The choice of promoter may vary depending on the temporal and spatial requirements for expression, and also may vary based on the host cell to be transformed. Promoters for many different organisms are well known in the art. Based on the extensive knowledge present in the art, the appropriate promoter can be selected for the particular host organism of interest. Thus, for example, much is known about promoters upstream of highly constitutively expressed genes in model organisms and such knowledge can be readily accessed and implemented in other systems as appropriate.

[0072] In some embodiments, a promoter functional in a plant may be used with the constructs of this invention. Non-limiting examples of a promoter useful for driving expression in a plant include the promoter of the RuBisCo small subunit gene 1 (PrbcS1), the promoter of the actin gene (Pactin), the promoter of the nitrate reductase gene (Pnr) and the promoter of duplicated carbonic anhydrase gene 1 (Pdca1) (See, Walker et al. Plant Cell Rep. 23:727-735 (2005); Li et al. Gene 403:132-142 (2007); Li et al. Mol Biol. Rep. 37:1143-1154 (2010)). PrbcS1 and Pactin are constitutive promoters and Pnr and Pdca1 are inducible promoters. Pnr is induced by nitrate and repressed by ammonium (Li et al. Gene 403:132-142 (2007)) and Pdca1 is induced by salt (Li et al. Mol Biol. Rep. 37:1143-1154 (2010)). In some embodiments, a promoter useful with this invention is RNA polymerase II (Pol II) promoter. In some embodiments, a U6 promoter or a 7SL promoter from Zea mays may be useful with constructs of this invention. In some embodiments, the U6c promoter and/or 7SL promoter from Zea mays may be useful for driving expression of a guide nucleic acid. In some embodiments, a U6c promoter, U6i promoter and/or 7SL promoter from Glycine max may be useful with constructs of this invention. In some embodiments, the U6c promoter, U6i promoter and/or 7SL promoter from Glycine max may be useful for driving expression of a guide nucleic acid.

[0073] Examples of constitutive promoters useful for plants include, but are not limited to, cestrum virus promoter (cmp) (U.S. Pat. No. 7,166,770), the rice actin 1 promoter (Wang et al. (1992) Mol. Cell. Biol. 12:3399-3406; as well as U.S. Pat. No. 5,641,876), CaMV 35S promoter (Odell et al. (1985) Nature 313:810-812), CaMV 19S promoter (Lawton et al. (1987) Plant Mol. Biol. 9:315-324), nos promoter (Ebert et al. (1987) Proc. Natl. Acad. Sci USA 84:5745-5749), Adh promoter (Walker et al. (1987) Proc. Natl. Acad. Sci. USA 84:6624-6629), sucrose synthase promoter (Yang & Russell (1990) Proc. Natl. Acad. Sci. USA 87:4144-4148), and the ubiquitin promoter. The constitutive promoter derived from ubiquitin accumulates in many cell types. Ubiquitin promoters have been cloned from several plant species for use in transgenic plants, for example, sunflower (Binet et al., 1991. Plant Science 79:87-94), maize (Christensen et al., 1989. Plant Molec. Biol. 12:619-632), and arabidopsis (Norris et al. 1993. Plant Molec. Biol. 21:895-906). The maize ubiquitin promoter (UbiP) has been developed in transgenic monocot systems and its sequence and vectors constructed for monocot transformation are disclosed in the European patent publication EP0342926. The ubiquitin promoter is suitable for the expression of the nucleotide sequences of the invention in transgenic plants, especially monocotyledons. Further, the promoter expression cassettes described by McElroy et al. (Mol. Gen. Genet. 231:150-160 (1991)) can be easily modified for the expression of the nucleotide sequences of the invention and are particularly suitable for use in monocotyledonous hosts.

[0074] In some embodiments, tissue specific/tissue preferred promoters can be used for expression of a heterologous polynucleotide in a plant cell. Tissue specific or preferred expression patterns include, but are not limited to, green tissue specific or preferred, root specific or preferred, stem specific or preferred, flower specific or preferred or pollen specific or preferred. Promoters suitable for expression in green tissue include many that regulate genes involved in photosynthesis and many of these have been cloned from both monocotyledons and dicotyledons. In one embodiment, a promoter useful with the invention is the maize PEPC promoter from the phosphoenol carboxylase gene (Hudspeth & Grula, Plant Molec. Biol. 12:579-589 (1989)). Non-limiting examples of tissue-specific promoters include those associated with genes encoding the seed storage proteins (such as β-conglycinin, cruciferin, napin and phascolin), zein or oil body proteins (such as oleosin), or proteins involved in fatty acid biosynthesis (including acyl carrier protein, stearoyl-ACP desaturase and fatty acid desaturases (fad 2-1)), and other nucleic acids expressed during embryo development (such as Bce4, see, e.g., Kridl et al. (1991) Seed Sci. Res. 1:209-219; as well as EP U.S. Pat. No. 255,378). Tissue-specific or tissue-preferential promoters useful for the expression of the nucleotide sequences of the invention in plants, particularly maize, include but are not limited to those that direct expression in root, pith, leaf or pollen. Such promoters are disclosed, for example, in WO 93/07278, incorporated by reference herein for its disclosure of promoters. Other non-limiting examples of tissue specific or tissue preferred promoters useful with the invention the cotton RuBisCo promoter disclosed in U.S. Pat. No. 6,040,504; the rice sucrose synthase promoter disclosed in U.S. Pat. No. 5,604,121; the root specific promoter described by de Framond (FEBS 290:103-106 (1991); European patent EP 0452269 to Ciba-Geigy); the stem specific promoter described in U.S. Pat. No. 5,625,136 (to Ciba-Geigy) and which drives expression of the maize trpA gene; the cestrum yellow leaf curling virus promoter disclosed in WO 01/73087; and pollen specific or preferred promoters including, but not limited to, ProOsLPS10 and ProOsLPS11 from rice (Nguyen et al. Plant Biotechnol. Reports 9 (5): 297-306 (2015)), ZmSTK2_USP from maize (Wang et al. Genome 60 (6): 485-495 (2017)), LAT52 and LAT59 from tomato (Twell et al. Development 109 (3): 705-713 (1990)), Zm13 (U.S. Pat. No. 10,421,972), PLA₂-δ promoter from arabidopsis (U.S. Pat. No. 7,141,424), and/or the ZmC5 promoter from maize (International PCT Publication No. WO 1999/042587).

[0075] Additional examples of plant tissue-specific/tissue preferred promoters include, but are not limited to, the root hair-specific cis-elements (RHEs) (KIM ET AL. The Plant Cell 18:2958-2970 (2006)), the root-specific promoters RCc3 (Jeong et al. Plant Physiol. 153:185-197 (2010)) and RB7 (U.S. Pat. No. 5,459,252), the lectin promoter (Lindstrom et al. (1990) Der. Genet. 11:160-167; and Vodkin (1983) Prog. Clin. Biol. Res. 138:87-98), corn alcohol dehydrogenase 1 promoter (Dennis et al. (1984) Nucleic Acids Res. 12:3983-4000), S-adenosyl-L-methionine synthetase (SAMS) (Vander Mijnsbrugge et al. (1996) Plant and Cell Physiology, 37 (8): 1108-1115), corn light harvesting complex promoter (Bansal et al. (1992) Proc. Natl. Acad. Sci. USA 89:3654-3658), corn heat shock protein promoter (O'Dell et al. (1985) EMBO J. 5:451-458; and Rochester et al. (1986) EMBO J. 5:451-458), pea small subunit RuBP carboxylase promoter (Cashmore, “Nuclear genes encoding the small subunit of ribulose-1,5-bisphosphate carboxylase” pp. 29-39 In: Genetic Engineering of Plants (Hollaender ed., Plenum Press 1983; and Poulsen et al. (1986) Mol. Gen. Genet. 205:193-200), Ti plasmid mannopine synthase promoter (Langridge et al. (1989) Proc. Natl. Acad. Sci. USA 86:3219-3223), Ti plasmid nopaline synthase promoter (Langridge et al. (1989), supra), petunia chalcone isomerase promoter (van Tunen et al. (1988) EMBO J. 7:1257-1263), bean glycine rich protein 1 promoter (Keller et al. (1989) Genes Dev. 3:1639-1646), truncated CaMV 35S promoter (O'Dell et al. (1985) Nature 313:810-812), potato patatin promoter (Wenzler et al. (1989) Plant Mol. Biol. 13:347-354), root cell promoter (Yamamoto et al. (1990) Nucleic Acids Res. 18:7449), maize zein promoter (Kriz et al. (1987) Mol. Gen. Genet. 207:90-98; Langridge et al. (1983) Cell 34:1015-1022; Reina et al. (1990) Nucleic Acids Res. 18:6425; Reina et al. (1990) Nucleic Acids Res. 18:7449; and Wandelt et al. (1989) Nucleic Acids Res. 17:2354), globulin-1 promoter (Belanger et al. (1991) Genetics 129:863-872), α-tubulin cab promoter (Sullivan et al. (1989) Mol. Gen. Genet. 215:431-440), PEPCase promoter (Hudspeth & Grula (1989) Plant Mol. Biol. 12:579-589), R gene complex-associated promoters (Chandler et al. (1989) Plant Cell 1:1175-1183), and chalcone synthase promoters (Franken et al. (1991) EMBO J. 10:2605-2612).

[0076] Useful for seed-specific expression is the pea vicilin promoter (Czako et al. (1992) Mol. Gen. Genet. 235:33-40; as well as the seed-specific promoters disclosed in U.S. Pat. No. 5,625,136. Useful promoters for expression in mature leaves are those that are switched at the onset of senescence, such as the SAG promoter from Arabidopsis (Gan et al. (1995) Science 270:1986-1988).

[0077] In addition, promoters functional in chloroplasts can be used. Non-limiting examples of such promoters include the bacteriophage T3 gene 9 5′ UTR and other promoters disclosed in U.S. Pat. No. 7,579,516. Other promoters useful with the invention include but are not limited to the S-E9 small subunit RuBP carboxylase promoter and the Kunitz trypsin inhibitor gene promoter (Kti3).

[0078] Additional regulatory elements useful with this invention include, but are not limited to, introns, enhancers, termination sequences and/or 5′ and 3′ untranslated regions.

[0079] An intron useful with this invention can be an intron identified in and isolated from a plant and then inserted into an expression cassette to be used in transformation of a plant. As would be understood by those of skill in the art, introns can comprise the sequences required for self-excision and are incorporated into nucleic acid constructs/expression cassettes in frame. An intron can be used either as a spacer to separate multiple protein-coding sequences in one nucleic acid construct, or an intron can be used inside one protein-coding sequence to, for example, stabilize the mRNA. If they are used within a protein-coding sequence, they are inserted “in-frame” with the excision sites included. Introns may also be associated with promoters to improve or modify expression. As an example, a promoter/intron combination useful with this invention includes but is not limited to that of the maize Ubi1 promoter and intron.

[0080] Non-limiting examples of introns useful with the present invention include introns from the ADHI gene (e.g., Adh1-S introns 1, 2 and 6), the ubiquitin gene (Ubi1), the RuBisCO small subunit (rbcS) gene, the RuBisCO large subunit (rbcL) gene, the actin gene (e.g., actin-1 intron), the pyruvate dehydrogenase kinase gene (pdk), the nitrate reductase gene (nr), the duplicated carbonic anhydrase gene 1 (Tdca1), the psbA gene, the atpA gene, or any combination thereof.

[0081] An “editing system” as used herein refers to any site-specific (e.g., sequence-specific) nucleic acid editing system now known or later developed, which system can introduce a modification (e.g., a mutation) in a nucleic acid in target specific manner. For example, an editing system (e.g., a site- and/or sequence-specific editing system) can include, but is not limited to, a CRISPR-Cas editing system, a meganuclease editing system, a zinc finger nuclease (ZFN) editing system, a transcription activator-like effector nuclease (TALEN) editing system, a base editing system and/or a prime editing system, each of which may comprise one or more polypeptide(s) and/or one or more polynucleotide(s) that when present and/or expressed together (e.g., as a system) in a composition and/or cell can modify (e.g., mutate) a target nucleic acid in a sequence specific manner. In some embodiments, an editing system (e.g., a site- and/or sequence-specific editing system) can comprise one or more polynucleotide(s) and/or one or more polypeptide(s), including but not limited to a nucleic acid binding polypeptide (e.g., a DNA binding domain), a nuclease, another polypeptide, and/or a polynucleotide. In some embodiments, a CRISPR-Cas editing system is provided and/or is used that comprises a fusion protein of the present invention.

[0082] In some embodiments, an editing system comprises one or more sequence-specific nucleic acid binding polypeptide(s) (e.g., a DNA binding domain) that can be from, for example, a polynucleotide-guided endonuclease, a CRISPR-Cas endonuclease (e.g., CRISPR-Cas effector protein), a zinc finger nuclease, a transcription activator-like effector nuclease (TALEN) and/or an Argonaute protein. In some embodiments, an editing system comprises one or more cleavage polypeptide(s) (e.g., nucleases) including, but not limited to, an endonuclease (e.g., Fok1), a polynucleotide-guided endonuclease, a CRISPR-Cas endonuclease (e.g., CRISPR-Cas effector protein), a zinc finger nuclease, and/or a transcription activator-like effector nuclease (TALEN).

[0083] A “nucleic acid binding polypeptide” as used herein refers to a polypeptide or domain that binds and/or is capable of binding a nucleic acid (e.g., a target nucleic acid). A DNA binding domain is an exemplary nucleic acid binding polypeptide and may be a site- and/or sequence-specific nucleic acid binding domain. In some embodiments, a nucleic acid binding polypeptide may be a sequence-specific nucleic acid binding polypeptide such as, but not limited to, a sequence-specific binding domain from, for example, a polynucleotide-guided endonuclease, a CRISPR-Cas effector protein (e.g., a CRISPR-Cas endonuclease), a zinc finger nuclease, a transcription activator-like effector nuclease (TALEN) and/or an Argonaute protein. In some embodiments, a nucleic acid binding polypeptide comprises a cleavage domain (e.g., a nuclease domain) such as, but not limited to, an endonuclease (e.g., Fok1), a polynucleotide-guided endonuclease, a CRISPR-Cas endonuclease, a zinc finger nuclease, and/or a transcription activator-like effector nuclease (TALEN). In some embodiments, the nucleic acid binding polypeptide associates with and/or is capable of associating with (e.g., forms a complex with) with one or more nucleic acid molecule(s) (e.g., forms a complex with a guide nucleic acid as described herein), which may direct and/or guide the nucleic acid binding polypeptide to a specific target nucleotide sequence (e.g., a gene locus of a genome) that is complementary to the one or more nucleic acid molecule(s) (or a portion or region thereof), thereby causing the nucleic acid binding polypeptide to bind to the nucleotide sequence at the specific target site. In some embodiments, the nucleic acid binding polypeptide is a CRISPR-Cas effector protein as described herein.

[0084] In some embodiments, an editing system comprises or is a ribonucleoprotein such as an assembled ribonucleoprotein complex (e.g., a ribonucleoprotein that comprises a CRISPR-Cas effector protein, a guide nucleic acid, and optionally a deaminase and/or reverse transcriptase). In some embodiments, a ribonucleoprotein of an editing system may be assembled together (e.g., a pre-assembled ribonucleoprotein including a CRISPR-Cas effector protein, a guide nucleic acid, and optionally a deaminase and/or reverse transcriptase) such as when contacted to a target nucleic acid or when introduced into a cell (e.g., a mammalian cell or a plant cell) (e.g., at the time of contacting the components of the ribonucleoprotein to a target nucleic acid and/or at the time of introducing the components of the ribonucleoprotein into a cell). In some embodiments, a ribonucleoprotein of an editing system may assemble into a complex (e.g., a non-covalently bound complex) while a portion of the ribonucleoprotein is contacting a target nucleic acid and/or may assemble after and/or during introduction into a plant cell. In some embodiments, an editing system may be assembled (e.g., into a non-covalently bound complex) when introduced into a plant cell. In some embodiments, a ribonucleoprotein of an editing system may be contacted with a target nucleic acid and/or may be introduced into a plant cell. In some embodiments, an editing system may be assembled (e.g., into a non-covalently bound complex) when introduced into a plant cell. In some embodiments, a ribonucleoprotein may comprise a fusion protein of the present invention (e.g., a polypeptide comprising a CRISPR-Cas effector protein and a polypeptide that has at least about 70%, 75%, 80%, 85%, 90%, 95%, 96%, 97%, 98%, 99%, or 100% sequence identity to one or more of SEQ ID NOs:241-242), a guide nucleic acid, and optionally a deaminase and/or reverse transcriptase. In some embodiments, a fusion protein of the present invention is used in place of (e.g., substituted for) a CRISPR-Cas effector protein (e.g., in a composition, complex, kit, method, and/or system such as an editing system described herein) and/or functions as a CRISPR-Cas effector protein, optionally in a composition, complex, ribonucleoprotein, kit, method, system, and/or editing system of the present invention.

[0085] In some embodiments, an editing system of the present invention comprises a reverse transcriptase, an extended guide nucleic acid, and a fusion protein of the present invention. In some embodiments, the fusion protein of the present invention, the reverse transcriptase, and the extended guide nucleic acid may form a complex or may be comprised in a complex that is capable of interacting with a target nucleic acid.

[0086] In some embodiments, a guide nucleic acid further comprises a reverse transcriptase template and may be referred to as an extended guide nucleic acid. An “extended guide nucleic acid” as used herein is a guide nucleic acid as described herein that further comprises a reverse transcriptase template (RTT) and/or a primer binding site (PBS). In some embodiments, an extended guide nucleic acid is an engineered prime editing guide RNA (pegRNA). An extended guide nucleic acid may be a targeted allele guide RNA (tagRNA) or a stabilized targeted allele guide RNA (stagRNA). A “tagRNA” as used herein refers to an extended guide nucleic acid that comprises a PBS and a RTT and has target strand complementarity. A “stagRNA” as used herein refers to a tagRNA that comprises a stabilization motif. A stabilization motif may be present at the 3′ and/or 5′ end of a tagRNA. In some embodiments, a stabilization motif is present at the 3′ end of a tagRNA. Exemplary stabilization motifs include, but are not limited to, recruiting motifs, RNA hairpins, pseudoknot sequences, and/or PP7 motifs (e.g., a PP7 RNA hairpin sequence). In some embodiments, a stagRNA is a tagRNA that comprises a PP7 RNA hairpin sequence. In some embodiments, a CRISPR-Cas effector protein (e.g., a Type II or Type V CRISPR-Cas effector protein), a reverse transcriptase, and an extended guide nucleic acid can form a complex or are comprised in a complex.

[0087] In some embodiments, an extended guide nucleic acid comprises an extended portion that includes a primer binding site and a reverse transcriptase template, wherein the reverse transcriptase template comprises the modification (e.g., edit) to be incorporated into a target nucleic acid. In some embodiments, an extended guide nucleic acid comprises, at its 3′ end, a primer binding site and a modification (e.g., an edit) to be incorporated into the target nucleic acid (e.g., a reverse transcriptase template). In some embodiments, an extended guide nucleic acid comprises: (1) a sequence that interacts (e.g., recruits and/or binds) with a CRISPR-Cas effector protein (e.g., a CRISPR-Cas nuclease), (2) a spacer having substantial complementary to a first site on a target nucleic acid (e.g., a CRISPR RNA (crRNA) (a first crRNA) and/or tracrRNA+crRNA (sgRNA)), and (3) a nucleic acid encoded repair template (e.g., an RNA encoded repair template) comprising a primer binding site and an RNA template (e.g., that encodes the modification to be incorporated into the target nucleic acid). In some embodiments, an extended guide nucleic acid (e.g., an extended guide RNA) may comprise, 5′-3′, a spacer sequence, a repeat sequence, and an extended portion, the extended portion comprising, 5′ to 3′, a reverse transcriptase template and a primer binding site. In some embodiments, an extended guide nucleic acid may comprise, 5′-3′, a spacer sequence, a repeat sequence and an extended portion, the extended portion comprising, 5′ to 3′, a primer binding site and a reverse transcriptase template. In some embodiments, an extended guide nucleic acid may comprise, 5′-3′, an extended portion, a spacer sequence, and a repeat sequence, wherein the extended portion comprises, 5′ to 3′, a reverse transcriptase template and a primer binding site. In some embodiments, an extended guide nucleic acid may comprise, 5′-3′, an extended portion, a spacer sequence, and a repeat sequence, wherein the extended portion comprises, 5′ to 3′, a primer binding site and a reverse transcriptase template.

[0088] According to some embodiments, an extended guide nucleic acid (e.g., a pegRNA) may have a structure and/or be designed as described in Anzalone et al., Nature, 2019 December; 576 (7785): 149-157. In some embodiments, an extended guide nucleic acid comprises a primer binding site (PBS) optionally having a sequence of 1, 2, 3, 4, or 5 to 6, 7, 8, 9, 10, 11, 12, 13, 14, or 15 nucleotides and a reverse transcriptase template (RT template) sequence optionally having a sequence of 65 nucleotides or more. In some embodiments, a PBS of an extended guide nucleic acid has a sequence of less than 15 nucleotides and has a sequence of 1, 2, 3, 4, 5, 6, 7, 8, 9, 10, 11, 12, 13, or 14 nucleotides (e.g., a sequence of 5 or 6 nucleotides in length). The RT template sequence may be after the PBS sequence in the 5′ to 3′ direction. In some embodiments, the RT template sequence of the extended guide nucleic acid has a length of greater than 65 nucleotides and may comprise about 50 or more nucleotides of heterology relative to the target site (e.g., target nucleic acid), followed by about 15 or more nucleotides of homology relative to the target site. In some embodiments, the RT template sequence of the extended guide nucleic acid is after the PBS sequence and the RT template sequence has a length of greater than 65 nucleotides with the sequence including more than 50 nucleotides of heterology relative to the target site, followed by more than 15 nucleotides of homology relative to the target site. Accordingly, in some embodiments, when the extended guide nucleic acid is reverse transcribed, the resulting newly transcribed sequence may hybridize and/or is configured to hybridize with the unnicked strand of the target site, which may thereby create a heteroduplex DNA with a large insertion into the newly synthesized strand. Upon repair of this mismatched DNA, the resultant repaired DNA may contain a large insertion (e.g., greater than 50 nucleotides) of DNA sequence. In some embodiments, the method may provide a large deletion (e.g., greater than 50 nucleotides) of DNA sequence. In some embodiments, the PBS and the 15 or more nucleotides of homology to the target site may comprise homology arms, which may serve to insert the heterology into the target site optionally using homology directed repair. The inserted DNA may correspond to any functional sequence of DNA such as, but not limited to: a functional transgene; a fragment of DNA that is inserted into a gene in a way that, when the gene is transcribed, would produce a hairpin RNA that is sufficient to silence homologous genes through RNAi; and/or one or more functional site-specific recombination sites, e.g. lox, frt, which could then be used in subsequent Cre or Flp mediated site-specific recombination processes. In some embodiments, an extended guide nucleic acid may be too large to produce using a PolIII promoter in vivo. In some embodiments, an extended guide nucleic acid may be operatively associated with and/or produced using a PollI promoter. In some embodiments, a DNA binding polypeptide (e.g., a DNA binding domain) and/or DNA endonuclease may have a structure and/or be designed as described in Anzalone et al., Nature, 2019 December; 576 (7785): 149-157. In some embodiments, a DNA binding domain and/or DNA endonuclease is a CRISPR Cas polypeptide such as a Cas9 nickase, a nicking variant of another CRISPR Cas polypeptide, or Cas12a.

[0089] In some embodiments, two extended guide nucleic acids (e.g., pegRNAs) may be used (e.g., an editing system may comprise two extended guide nucleic acids). One or both of the two extended guide nucleic acids may have a structure and/or be designed as described in Anzalone et al., Nature, 2019 December; 576 (7785): 149-157. The two extended guide nucleic acids may comprise a primer binding site (PBS) optionally having a sequence of 1, 2, 3, 4, or 5 to 6, 7, 8, 9, 10, 11, 12, 13, 14, or 15 nucleotides and a reverse transcriptase template (RT template) sequence optionally having a sequence of 50 nucleotides or more. The RT template sequences of the two extended guide nucleic acids may be complementary to each other and as such the polynucleotides that are respectively reverse transcribed from each the RT templates will be complementary to each other and will be able to hybridize with each other. This may allow for the intermediates that are produced by this system and/or method to join together two sections of DNA that are otherwise separated by more than 50 nucleotides, e.g., within a chromosome, or that are positioned on two separate pieces of DNA, e.g., on two different chromosomes. After repair of the intermediates, the resultant products may produce, depending on the design of the RT template, large deletions, large inversions, or inter-chromosomal recombinations. Since all of these products are produced by homology-directed repair, the products may be predictably precise and/or reproducible. In some embodiments, a DNA binding polypeptide (e.g., a DNA binding domain) and/or DNA endonuclease may have a structure and/or be designed as described in Anzalone et al., Nature, 2019 December; 576 (7785): 149-157. In some embodiment, a DNA binding polypeptide and/or DNA endonuclease is a CRISPR Cas polypeptide such as a Cas9 nickase, a similar nicking variant of another CRISPR Cas polypeptide, or Cas12a. In some embodiments, a DNA binding polypeptide and/or DNA endonuclease is a Cas9 nuclease, a similar nuclease from another CRISPR Cas polypeptide, or Cas12a. Using a nuclease (rather than a nickase) may facilitate the intra- or interchromosomal recombination processes through single-strand annealing of the more than 50 nucleotide 3′ overhangs that would be produced at each of the two target sites corresponding to the two pegRNA target nucleic acids. In some embodiments, an editing system comprises one extended guide nucleic acid and a guide nucleic acid that is devoid of a reverse transcriptase template and/or primer binding site.

[0090] An extended guide nucleic acid may comprise a CRISPR nucleic acid (e.g., CRISPR RNA, CRISPR DNA, crRNA, crDNA) and/or a CRISPR nucleic acid and a tracr nucleic acid; and (b) an extended portion comprising a primer binding site and a reverse transcriptase template (RT template), wherein the RT template encodes a modification to be incorporated into the target nucleic acid. The CRISPR nucleic acid may be a Type II or Type V CRISPR nucleic acid and/or the tracr nucleic acid may be any traer corresponding to the appropriate Type II or Type V CRISPR nucleic acid. In some embodiments, an extended guide nucleic acid comprises: (i) a Type V CRISPR nucleic acid or a Type II CRISPR nucleic acid (e.g., a Type II or Type V CRISPR RNA, Type II or Type V CRISPR DNA, Type II or Type V crRNA, or Type II or Type V crDNA) and/or a CRISPR nucleic acid and a tracr nucleic acid (e.g., a Type II or Type V tracrRNA, Type II or Type V tracrDNA); and (ii) an extended portion comprising a primer binding site and a reverse transcriptase template (RT template), wherein the Type V CRISPR nucleic acid or Type II CRISPR nucleic acid comprises a spacer that binds to a first strand (e.g., the target strand) of a target nucleic acid (e.g., the spacer is complementary to a portion of consecutive nucleotides in the first strand of the target nucleic acid) and the primer binding site binds to the first strand (e.g., target strand). In some embodiments, the extended portion can be fused to either the 5′ end or 3′ end of the CRISPR nucleic acid (e.g., from 5′ to 3′: repeat-spacer-extended portion or extended portion-repeat-spacer) and/or to the 5′ or 3′ end of the tracr nucleic acid. In some embodiments, the extended portion of an extended guide nucleic acid comprises, 5′ to 3′, an RT template (RTT) and a primer binding site (PBS) (e.g., 5′-crRNA-spacer-RTT (edit encoded)-PBS-3′) or comprises 5′ to 3′ a PBS and RTT, depending on the location of the extended portion relative to the CRISPR nucleic acid of the extended guide nucleic acid (e.g., 5′-crRNA-spacer-PBS-RTT (edit encoded)-3′). For example, in some embodiments, an extended portion of the extended guide nucleic acid may comprise, 5′ to 3′, an RT template and a primer binding site (when the extended guide is linked to the 3′ end of the CRISPR nucleic acid). In some embodiments, an extended portion of the extended guide may comprise, 5′ to 3′, a primer binding site and an RT template (when the extended guide is linked to the 5′ end of the CRISPR nucleic acid).

[0091] In some embodiments, a target nucleic acid is double stranded and comprises a first strand and a second strand and a primer binding site of an extended guide nucleic acid binds to the second strand (e.g., the non-target, top strand) of the target nucleic acid. In some embodiments, a target nucleic acid is double stranded and comprises a first strand and a second strand and a primer binding site of an extended guide nucleic acid binds to the first strand (e.g., binds to the target strand, optionally the same strand to which a CRISPR-Cas effector protein is recruited, bottom strand) of the target nucleic acid. In some embodiments, a target nucleic acid is double stranded and comprises a first strand and a second strand and the primer binding site of an extended guide nucleic acid binds to the second strand (e.g., the non-target strand, optionally the opposite strand from that to which the CRISPR-Cas effector protein is recruited) of the target nucleic acid. In some embodiments, a reverse transcriptase (RT) may add to the target strand of a target nucleic acid (e.g., the strand to which the spacer of the CRISPR nucleic acid of the extended guide nucleic acid is complementary and to which the CRISPR-Cas effector protein is recruited). In some embodiments, the reverse transcriptase (RT) adds to the non-target strand of a target nucleic acid (e.g., the strand that is complementary to the strand to which the spacer of the CRISPR nucleic acid is complementary and to which the CRISPR-Cas effector protein is recruited). Example methods and editing systems are described in International Patent Publication No. WO 2021/092130, International Patent Publication No. WO 2022/098993, and U.S. Patent Application Publication Nos. 2021/0147862, 2021/0130835, 2021/0147862, and 2022/0145334, each of which are incorporated herein by reference in their entirety.

[0092] The RT template of an extended guide nucleic acid may encode one or more modification(s) (e.g., edit(s)) to be incorporated into a target nucleic acid. The one or more modification(s) may be located in any position within an RT template (e.g., where the position location may be relative to the position of a protospacer adjacent motif (PAM) of the target nucleic acid). In some embodiments, an RT template has a modification at one or more positions from −1 to 23 (e.g., −1, 1, 2, 3, 4, 5, 6, 7, 8, 9, 10, 11, 12, 13, 14, 15, 16, 17, 18, 19, 20, 21, 22, or 23) relative to the position of a protospacer adjacent motif (PAM) (e.g., TTTG) in a target nucleic acid. In some embodiments, an RT template may comprise a modification located at nucleotide position −1, 1, 2, 3, 4, 5, 6, 7, 8, 9, 10, 11, 12, 13, 14, 15, 16, 17, 18, 19, 20, 21, 22 or 23. In some embodiments, an RT template may comprise a modification located at nucleotide position 4 to nucleotide position 17 (e.g., position 4, 5, 6, 7, 8, 9, 10, 11, 12, 13, 14, 15, 16, or 17) of the RT template relative to the position of a PAM of a target nucleic acid. In some embodiments, an RT template may comprise a modification located at nucleotide position 10 to nucleotide position 17 (e.g., position 10, 11, 12, 13, 14, 15, 16, or 17) of the RT template relative to the position of a PAM of a target nucleic acid. In some embodiments, an RT template may comprise a modification located at nucleotide position 12 to nucleotide position 15 (e.g., position 12, 13, 14, or 15) of the RT template relative to the position of a PAM of a target nucleic acid.

[0093] In some embodiments, an extended portion of an extended guide nucleic acid may comprise, 5′ to 3′, an RT template and a primer binding site (e.g., when the extended portion is linked to the 3′ end of a CRISPR nucleic acid). In some embodiments, an extended portion of an extended guide nucleic acid may comprise, 5′ to 3′, a primer binding site and an RT template (RTT) (e.g., when the extended portion is linked to the 5′ end of the CRISPR nucleic acid). In some embodiments, an RT template may have a length of about 1 nucleotide to about 100 nucleotides (e.g., about 1, 2, 3, 4, 5, 6, 7, 8, 9, 10, 11, 12, 13, 14, 15, 16, 17, 18, 19, 20, 21, 22, 23, 24, 25, 26, 27, 28, 29, 30, 31, 32, 33, 34, 35, 36, 37, 38, 39, 40, 41, 42, 43, 44, 45, 46, 47, 48, 49, 50, 51, 52, 53, 54, 55, 56, 57, 58, 59, 60, 61, 62, 63, 64, 65, 66, 67, 68, 69, 70, 71, 72, 73, 74, 75, 76, 77, 78, 79, 80, 81, 82, 83, 84, 85, 86, 87, 88, 89, 90, 91, 92, 93, 94, 95, 96, 97, 98, 99, 100 or more nucleotides, and any range or value therein), e.g., about 1 nucleotide to about 10 nucleotides, about 1 nucleotide to about 15 nucleotides, about 1 nucleotide to about 20 nucleotides, about 1 nucleotide to about 25 nucleotides, about 1 nucleotide to about 30 nucleotides, about 1 nucleotide to about 35, 36, 37, 38, 39 or 40 nucleotides, about 1 nucleotide to about 50 nucleotides, about 5 nucleotides to about 15 nucleotides, about 5 nucleotides to about 20 nucleotides, about 5 nucleotides to about 25 nucleotides, about 5 nucleotides to about 30 nucleotides, about 5 nucleotides to about 35, 36, 37, 38, 39 or 40 nucleotides, about 5 nucleotides to about 50 nucleotides, about 8 nucleotides to about 15 nucleotides, about 8 nucleotide to about 20 nucleotides, about 8 nucleotide to about 25 nucleotides, about 8 nucleotide to about 30 nucleotides, about 8 nucleotide to about 35, 36, 37, 38, 39 or 40 nucleotides, about 8 nucleotide to about 50 nucleotides in length, about 8 nucleotides to about 100 nucleotides, about 10 nucleotide to about 15 nucleotides, about 10 nucleotide to about 20 nucleotides, about 10 nucleotide to about 25 nucleotides, about 10 nucleotide to about 30 nucleotides, about 10 nucleotide to about 36 nucleotides, about 10 nucleotide to about 40 nucleotides, about 10 nucleotide to about 50 nucleotides, about 10 nucleotides to about 100 nucleotides in length and any range or value therein. In some embodiments, the length of an RT template may be at least 8 nucleotides, optionally about 8 nucleotides to about 100 nucleotides. In some embodiments, the length of an RT template is 36, 37, 38, 39 or 40 nucleotides or less (e.g., about 1, 2, 3, 4, 5, 6, 7, 8, 9, 10, 11, 12, 13, 14, 15, 16, 17, 18, 19, 20, 21, 22, 23, 24, 25, 26, 27, 28, 29, 30, 31, 32, 33, 34, 35, 36, 37, 38, 39, or 40 nucleotides in length, or any value or range therein (e.g., about 1, 2, 3, 4, 5, 6, 7, 8, 9, 10, 11, 12, 13, 14, or 15 nucleotides in length to about 16, 17, 18, 19, 20, 21, 22, 23, 24, 25, 26, 27, 28, 29, 30, 31, 32, 33, 34, 35, 36, 37, 38, 39, or 40 nucleotides in length). In some embodiments, the length of an RT template may be at least 30 nucleotides, optionally about 30, 31, 32, 33, 34, 35, 36, 37, 38, 39, or 40 nucleotides in length to about to about 41, 42, 43, 44, 45, 46, 47, 48, 49, 50, 51, 52, 53, 54, 55, 56, 57, 58, 59, 60, 61, 62, 63, 64, 65, 66, 67, 68, 69, 70, 71, 72, 73, 74, 75, 76, 77, 78, 79, or 80 nucleotides in length, or any range or value therein. In some embodiments, the length of an RT template may be about 36, 40, 44, 47, 50, 52, 55, 63, 72 or 74 nucleotides. Within the length of the RTT one or more modification(s) may be present. The one or more modification(s) may be located anywhere within the RTT, wherein the position of the modification may be described relative to the position of a protospacer adjacent motif (PAM) of a target nucleic acid. In some embodiments, an RT template may comprise a modification located at nucleotide position-1, 1, 2, 3, 4, 5, 6, 7, 8, 9, 10, 11, 12, 13, 14, 15, 16, 17, 18, 19, 20, 21, 22 or 23. In some embodiments, an RT template may comprise a modification located at nucleotide position 4 to nucleotide position 17 (e.g., position 4, 5, 6, 7, 8, 9, 10, 11, 12, 13, 14, 15, 16, or 17) of the RT template relative to the position of a protospacer adjacent motif (PAM) of a target nucleic acid. In some embodiments, an RT template may comprise a modification located at nucleotide position 10 to nucleotide position 17 (e.g., position 10, 11, 12, 13, 14, 15, 16, or 17) of the RT template relative to the position of a protospacer adjacent motif (PAM) of a target nucleic acid. In some embodiments, an RT template may comprise a modification located at nucleotide position 12 to nucleotide position 15 (e.g., position 12, 13, 14, or 15) of the RT template relative to the position of a protospacer adjacent motif (PAM) of a target nucleic acid.

[0094] As used herein, a “primer binding site” (PBS) of an extended portion of an extended guide nucleic acid (e.g., a tagRNA) refers to a sequence of consecutive nucleotides that can bind to a region or “primer” on a target nucleic acid, e.g., is complementary to the target nucleic acid primer. As an example, a CRISPR Cas effector protein (e.g., a Type II or Type V, e.g., Cas 9 or Cas12a) may nick/cut the DNA and the 3′ end of the cut DNA acts as a primer for the PBS portion of the extended guide nucleic acid. The PBS may be complementary to the 3′ end of a strand of the target nucleic acid and may bind and/or may be configured to bind to either the target strand or non-target strand. A primer binding site can be fully complementary to the primer or it may be substantially complementary (e.g., at least 70% complementary (e.g., 70% or about 71%, 72%, 73%, 74%, 75%, 76%, 77%, 78%, 79%, 80%, 81%, 82%, 83%, 84%, 85%, 86%, 87%, 88%, 89%, 90%, 91%, 92%, 93%, 94%, 95%, 96%, 97%, 98%, 99%, 99.5%, 99.6%, 99.7%, 99.8%, 99.9% or more)) to the primer of a target nucleic acid. In some embodiments, the length of a primer binding site of an extended portion may be about 1 nucleotide to about 100 nucleotides in length (e.g., about 1, 2, 3, 4, 5, 6, 7, 8, 9, 10, 11, 12, 13, 14, 15, 16, 17, 18, 19, 20, 21, 22, 23, 24, 25, 26, 27, 28, 29, 30, 31, 32, 33, 34, 35, 36, 37, 38, 39, 40, 41, 42, 43, 44, 45, 46, 47, 48, 49, 50, 51, 52, 53, 54, 55, 56, 57, 58, 59, 60, 61, 62, 63, 64, 65, 66, 67, 68, 69, 70, 71, 72, 73, 74, 75, 76, 77, 78, 79, 80, 81, 82, 83, 84, 85, 86, 87, 88, 89, 90, 91, 92, 93, 94, 95, 96, 97, 98, 99, 100 or more nucleotides, or any value or range therein), or about 4 nucleotide to about 85 nucleotides, about 10 nucleotide to about 80 nucleotides, about 20 nucleotide to about 80 nucleotides, about 25 nucleotides to about 80 nucleotides about 30 nucleotide to about 80 nucleotides, about 40 nucleotide to about 80 nucleotides, about 45 nucleotide to about 80 nucleotides, about 45 nucleotide to about 75 nucleotides, or about 45 nucleotide to about 60 nucleotides, or any range or value therein. In some embodiments, the length of a PBS may be at least 30 nucleotides, optionally about 30, 31, 32, 33, 34, 35, 36, 37, 38, 39, or 40 nucleotides to about 41, 42, 43, 44, 45, 46, 47, 48, 49, 50, 51, 52, 53, 54, 55, 56, 57, 58, 59, 60, 61, 62, 63, 64, 65, 66, 67, 68, 69, 70, 71, 72, 73, 74, 75, 76, 77, 78, 79, or 80 nucleotides in length, or any range or value therein. In some embodiments, the length of a PBS may be about 8, 16, 24, 32, 40, 48, 56, 64, 72, or 80 nucleotides.

[0095] In some embodiments, an RTT may have a length of about 35 nucleotides to about 75 nucleotides and a PBS may have a length of about 30 nucleotides to about 80 nucleotides, optionally wherein the PBS may comprise a length of about 8, 16, 24, 32, 40, 48, 56, 64, 72, or 80 nucleotides and the RTT may comprise a length of about 36, 40, 44, 47, 50, 52, 55, 63, 72 or 74 nucleotides, or any combination thereof of the RTT length and/or PBS length.

[0096] In some embodiments, an extended portion of an extended guide nucleic acid may be fused to either the 5′ end or 3′ end of a Type II or a Type V CRISPR nucleic acid (e.g., 5′ to 3′: repeat-spacer-extended portion, or extended portion-repeat-spacer) and/or to the 5′ or 3′ end of the tracr nucleic acid. In some embodiments, when an extended portion is located 5′ of the crRNA, a Type V CRISPR-Cas effector protein is modified to reduce (or eliminate) self-processing RNAse activity.

[0097] In some embodiments, the extended portion of an extended guide nucleic acid may be linked to the Type II or Type V CRISPR nucleic acid and/or the Type II or Type V tracrRNA via a linker. In some embodiments, a linker have a length of about 1 to about 100 nucleotides or more (e.g., about 1, 2, 3, 4, 5, 6, 7, 8, 9, 10, 11, 12, 13, 14, 15, 16, 17, 18, 19, 20, 21, 22, 23, 24, 25, 26, 27, 28, 29, 30, 31, 32, 33, 34, 35, 36, 37, 38, 39, 40, 41, 42, 43, 44, 45, 46, 47, 48, 49, 50, 51, 52, 53, 54, 55, 56, 57, 58, 59, 60, 61, 62, 63, 64, 65, 66, 67, 68, 69, 70, 71, 72, 73, 74, 75, 76, 77, 78, 79, 80, 81, 82, 83, 84, 85, 86, 87, 88, 89, 90, 91, 92, 93, 94, 95, 96, 97, 98, 99, 100 or more nucleotides in length, and any range therein (e.g., about 2 to about 40, about 2 to about 50, about 2 to about 60, about 4 to about 40, about 4 to about 50, about 4 to about 60, about 5 to about 40, about 5 to about 50, about 5 to about 60, about 9 to about 40, about 9 to about 50, about 9 to about 60, about 10 to about 40, about 10 to about 50, about 10 to about 60, about 40 to about 100, about 50 to about 100, or about 2, 3, 4, 5, 6, 7, 8, 9, 10, 11, 12, 13, 14, 15, 16, 17, 18, 19, 20, 21, 22, 23, 24, 25 nucleotides to about 26, 27, 28, 29, 30, 31, 32, 33, 34, 35, 36, 37, 38, 39, 40, 41, 42, 43, 44, 45, 46, 47, 48, 49, 50, 51, 52, 53, 54, 55, 56, 57, 58, 59, 60, 61, 62, 63, 64, 65, 66, 67, 68, 69, 70, 71, 72, 73, 74, 75, 76, 77, 78, 79, 80, 81, 82, 83, 84, 85, 86, 87, 88, 89, 90, 91, 92, 93, 94, 95, 96, 97, 98, 99, 100 or more nucleotides in length (e.g., about 105, 110, 115, 120, 130, 140 150 or more nucleotides in length).

[0098] A guide nucleic acid and/or an extended guide nucleic acid may comprise one or more recruiting motifs as described herein, which may be linked to the 5′ end and/or the 3′ end of the guide nucleic acid and/or it may be inserted into the guide nucleic acid (e.g., within a hairpin loop of the guide nucleic acid). In some embodiments, an extended guide nucleic acid may be linked to an RNA recruiting motif. An extended guide nucleic acid and/or guide nucleic acid may be linked to one or to two or more RNA recruiting motifs (e.g., 1, 2, 3, 4, 5, 6, 7, 8, 9, 10 or more motifs, e.g., at least 10 to about 25 motifs), optionally wherein the two or more RNA recruiting motifs may be the same RNA recruiting motif or different RNA recruiting motifs. In some embodiments, an RNA recruiting motif may be located on the 3′ end of the extended portion of an extended guide nucleic acid (e.g., 5′-3′, repeat-spacer-extended portion (RT template-primer binding site)-RNA recruiting motif). In some embodiments, an RNA recruiting motif may be embedded in the extended portion of an extended guide nucleic acid.

[0099] In some embodiments, an editing system comprises an extended guide nucleic acid that is linked to an RNA recruiting motif and a reverse transcriptase that is a reverse transcriptase fusion protein, wherein the reverse transcriptase fusion protein comprises a reverse transcriptase polypeptide fused to an affinity polypeptide that binds to the RNA recruiting motif, wherein the extended guide nucleic acid binds to a target nucleic acid and the RNA recruiting motif binds to the affinity polypeptide, thereby recruiting the reverse transcriptase fusion protein to the extended guide nucleic acid and contacting the target nucleic acid with the reverse transcriptase. In some embodiments, two or more reverse transcriptase fusion proteins may be recruited to an extended guide nucleic acid, thereby contacting the target nucleic acid with two or more reverse transcriptase fusion proteins.

[0100] The terms “transgene” or “transgenic” as used herein refer to at least one nucleic acid sequence that is taken from the genome of one organism or produced synthetically, and which is then introduced into a host cell (e.g., a plant cell) or organism or tissue of interest and which is subsequently integrated into the host's genome by means of “stable” transformation or transfection approaches. In contrast, the term “transient” transformation or transfection or introduction refers to a way of introducing molecular tools including at least one nucleic acid (DNA, RNA, single-stranded or double-stranded or a mixture thereof) and/or at least one amino acid sequence, optionally comprising suitable chemical or biological agents, to achieve a transfer into at least one compartment of interest of a cell, including, but not restricted to, the cytoplasm, an organelle, including the nucleus, a mitochondrion, a vacuole, a chloroplast, or into a membrane, resulting in transcription and/or translation and/or association and/or activity of the at least one molecule introduced without achieving a stable integration or incorporation into the genome and thus without inheritance of the respective at least one molecule introduced into the genome of a cell. The term “transgene-free” refers to a condition in which a transgene is not present or found in the genome of a host cell or tissue or organism of interest.

[0101] In some embodiments, a polynucleotide and/or a nucleic acid construct of the invention can be an “expression cassette” or can be comprised within an expression cassette. As used herein, “expression cassette” means a recombinant nucleic acid molecule comprising, for example, a nucleic acid construct of the invention (e.g., a polynucleotide encoding a fusion protein of the present invention, a polynucleotide encoding a nuclease, a polynucleotide encoding a reverse transcriptase, a polynucleotide encoding a reverse transcriptase fusion protein, a polynucleotide encoding a peptide tag, a polynucleotide encoding an affinity polypeptide, a polynucleotide encoding a glycosylase, and/or a polynucleotide comprising a guide nucleic acid), wherein the nucleic acid construct is operably associated with at least a control sequence (e.g., a promoter). Thus, some embodiments of the invention provide expression cassettes designed to express, for example, a nucleic acid construct of the invention. When an expression cassette comprises more than one polynucleotide, the polynucleotides may be operably linked to a single promoter that drives expression of all of the polynucleotides or the polynucleotides may be operably linked to one or more separate promoters (e.g., three polynucleotides may be driven by one, two or three promoters in any combination). Thus, for example, a polynucleotide encoding a fusion protein of the present invention, and a polynucleotide comprising a guide nucleic acid comprised in an expression cassette may each be operably associated with a single promoter or one or more of the polynucleotide(s) may be operably associated with separate promoters (e.g., two or three promoters) in any combination, which may be the same or different from each other.

[0102] In some embodiments, an expression cassette comprising the polynucleotides/nucleic acid constructs of the invention may be optimized for expression in an organism (e.g., an animal, a plant, a bacterium and the like).

[0103] An expression cassette comprising a nucleic acid construct of the invention may be chimeric, meaning that at least one of its components is heterologous with respect to at least one of its other components (e.g., a promoter from the host organism operably linked to a polynucleotide of interest to be expressed in the host organism, wherein the polynucleotide of interest is from a different organism than the host or is not normally found in association with that promoter). An expression cassette may also be one that is naturally occurring but has been obtained in a recombinant form useful for heterologous expression.

[0104] An expression cassette can optionally include a transcriptional and/or translational termination region (i.e., termination region) and/or an enhancer region that is functional in the selected host cell. A variety of transcriptional terminators and enhancers are known in the art and are available for use in expression cassettes. Transcriptional terminators are responsible for the termination of transcription and correct mRNA polyadenylation. A termination region and/or the enhancer region may be native to the transcriptional initiation region, may be native to a gene encoding a CRISPR-Cas effector protein, or a gene encoding a fusion protein of the present invention, may be native to a host cell, or may be native to another source (e.g., foreign or heterologous to the promoter, to a gene encoding the CRISPR-Cas effector protein, to a host cell, or any combination thereof).

[0105] An expression cassette of the invention also can include a polynucleotide encoding a selectable marker, which can be used to select a transformed host cell. As used herein, “selectable marker” means a polynucleotide sequence that when expressed imparts a distinct phenotype to the host cell expressing the marker and thus allows such transformed cells to be distinguished from those that do not have the marker. Such a polynucleotide sequence may encode either a selectable or screenable marker, depending on whether the marker confers a trait that can be selected for by chemical means, such as by using a selective agent (e.g., an antibiotic and the like), or on whether the marker is simply a trait that one can identify through observation or testing, such as by screening (e.g., fluorescence). Many examples of suitable selectable markers are known in the art and can be used in the expression cassettes described herein.

[0106] The expression cassettes, the nucleic acid molecules/constructs and polynucleotide sequences described herein can be used in connection with vectors. The term “vector” refers to a composition for transferring, delivering or introducing a nucleic acid (or nucleic acids) into a cell. A vector may comprise a nucleic acid construct comprising one or more nucleotide sequence(s) to be transferred, delivered or introduced into a cell. Vectors for use in transformation of host organisms are well known in the art. Non-limiting examples of general classes of vectors include viral vectors (e.g., Adeno-associated virus (AAV) vectors), plasmid vectors, phage vectors, phagemid vectors, cosmid vectors, fosmid vectors, bacteriophages, artificial chromosomes, minicircles, or Agrobacterium binary vectors in double or single stranded linear or circular form which may or may not be self transmissible or mobilizable. In some embodiments, a viral vector can include, but is not limited, to a retroviral, lentiviral, adenoviral, adeno-associated, or herpes simplex viral vector. A vector as defined herein can transform a prokaryotic or eukaryotic host either by integration into the cellular genome or exist extrachromosomally (e.g., autonomous replicating plasmid with an origin of replication). Additionally, included are shuttle vectors by which is meant a DNA vehicle capable, naturally or by design, of replication in two different host organisms, which may be selected from actinomycetes and related species, bacteria and eukaryotic (e.g., higher plant, mammalian, yeast or fungal cells). In some embodiments, the nucleic acid in the vector is under the control of, and operably linked to, an appropriate promoter or other regulatory elements for transcription in a host cell. The vector may be a bi-functional expression vector which functions in multiple hosts. In the case of genomic DNA, this may contain its own promoter and/or other regulatory elements and in the case of cDNA this may be under the control of an appropriate promoter and/or other regulatory elements for expression in the host cell. Accordingly, a nucleic acid construct of this invention and/or expression cassettes comprising the same may be comprised in vectors as described herein and as known in the art.

[0107] As used herein, “contact,” “contacting,” “contacted,” and grammatical variations thereof, refer to placing the components of a desired reaction together under conditions suitable for carrying out the desired reaction (e.g., transformation, transcriptional control, genome editing, nicking, and/or cleavage). Thus, for example, a target nucleic acid may be contacted with a nucleic acid construct of the invention comprising, for example, a polynucleotide encoding a fusion protein of the present invention and optionally a guide nucleic acid, under conditions whereby the fusion protein is expressed, and the fusion protein forms a complex with a guide nucleic acid, the complex hybridizes to the target nucleic acid, and optionally the fusion protein of the present invention may recruit one or more additional component(s) (e.g., a reverse transcriptase, glycosylase inhibitor, and/or deaminase) to it (and thus, to the target nucleic acid) or one or more additional component(s) is/are fused to the fusion protein, thereby modifying the target nucleic acid. In some embodiments, a fusion protein of the present invention localizes at a target nucleic acid, optionally through non-covalent interactions. Methods for recruiting one or more additional component(s) (e.g., a reverse transcriptase and/or deaminase) may be used that take advantage of other protein-protein interactions, RNA-protein interactions, and/or chemical interactions. In some embodiments, a target nucleic acid may be contacted with a ribonucleoprotein comprising a fusion protein of the present invention and optionally a guide nucleic acid and the ribonucleoprotein hybridizes to the target nucleic acid, and optionally the fusion protein of the present invention may recruit one or more additional component(s) (e.g., a reverse transcriptase, glycosylase inhibitor, and/or deaminase) to it (and thus, to the target nucleic acid) or one or more additional component(s) is/are fused to the fusion protein, thereby modifying the target nucleic acid.

[0108] In some embodiments, a target nucleic acid may be contacted with a nucleic acid construct of the invention encoding a fusion protein of the present invention and optionally a guide nucleic acid, under conditions whereby the fusion protein is expressed, or a target nucleic acid may be contacted with a fusion protein of the present invention and optionally a guide nucleic acid. The fusion protein of the present invention may form a complex with a guide nucleic acid, and the complex may hybridize to a target nucleic acid, and/or a fusion protein of the present invention may be recruited to a target nucleic acid, which may result in modifying the target nucleic acid.

[0109] As used herein, “modifying” or “modification” in reference to a target nucleic acid includes editing (e.g., mutating), covalent modification, exchanging/substituting nucleic acids/nucleotide bases, deleting, cleaving, and/or nicking of a target nucleic acid to thereby provide a modified nucleic acid and/or altering transcriptional control of a target nucleic acid to thereby provide a modified nucleic acid. In some embodiments, a modification may include an insertion and/or deletion of any size and/or a single base change (SNP) of any type. In some embodiments, a modification comprises a SNP. In some embodiments, a modification comprises exchanging and/or substituting one or more (e.g., 1, 2, 3, 4, 5, or more) nucleotides. In some embodiments, an insertion or deletion may be about 1 base to about 30,000 bases or more in length (e.g., about 1, 2, 3, 4, 5, 6, 7, 8, 9, 10, 11, 12, 13, 14, 15, 16, 17, 18, 19, 20, 21, 22, 23, 24, 25, 26, 27, 28, 29, 30, 31, 32, 33, 34, 35, 36, 37, 38, 39, 40, 41, 42, 43, 44, 45, 46, 47, 48, 49, 50, 51, 52, 53, 54, 55, 56, 57, 58, 59, 60, 61, 62, 63, 64, 65, 66, 67, 68, 69, 70, 71, 72, 73, 74, 75, 76, 77, 78, 79, 80, 81, 82, 83, 84, 85, 86, 87, 88, 89, 90, 91, 92, 93, 94, 95, 96, 97, 98, 99, 100, 110, 120, 130, 140, 150, 160, 170, 180, 190, 200, 210, 220, 230, 240, 250, 260, 270, 280, 290, 300, 310, 320, 330, 340, 350, 360, 370, 380, 390, 400, 410, 420, 430, 440, 450, 460, 470, 480, 490, 500, 510, 520, 530, 540, 550, 560, 570, 580, 590, 600, 610, 620, 630, 640, 650, 660, 670, 680, 690, 700, 710, 720, 730, 740, 750, 760, 770, 780, 790, 800, 810, 820, 830, 840, 850, 860, 870, 880, 890, 900, 910, 920, 930, 940, 950, 960, 970, 980, 990, 1000, 1100, 1200, 1300, 1400, 1500, 1600, 1700, 1800, 1900, 2000, 2500, 3000, 3500, 4000, 4500, 5000, 5500, 6000, 6500, 7000, 7500, 8000, 8500, 9000, 9500, 10,000, 10,500, 11,000, 11,500, 12,000, 12,500, 13,000, 13,500, 14,000, 14,500, 15,000, 15,500, 16,000, 16,500, 17,000, 17,500, 18,000, 18,500, 19,000, 19,500, 20,000, 20,500, 21,000, 21,500, 22,000, 22,500, 23,000, 23,500, 24,000, 24,500, 25,000, 25,500, 26,000, 26,500, 27,000, 27,500, 28,000, 28,500, 29,000, 29,500, 30,000 bases in length or more, or any value or range therein). Thus, in some embodiments, an insertion or deletion may be about 1, 2, 3, 4, 5, 6, 7, 8, 9, 10, 11, 12, 13, 14, 15, 16, 17, 18, 19, 20, 21, 22, 23, 24, 25, 26, 27, 28, 29, 30, 31, 32, 33, 34, 35, 36, 37, 38, 39, 40, 41, 42, 43, 44, 45, 46, 47, 48, 49, 50, 51, 52, 53, 54, 55, 56, 57, 58, 59, 60, 61, 62, 63, 64, 65, 66, 67, 68, 69, 70, 71, 72, 73, 74, 75, 76, 77, 78, 79, 80, 81, 82, 83, 84, 85, 86, 87, 88, 89, 90, 91, 92, 93, 94, 95, 96, 97, 98, 99, 100, 110, 120, 130, 140, 150, 160, 170, 180, 190, 200, 210, 220, 230, 240, 250, 260, 270, 280, 290, 300 to about 310, 320, 330, 340, 350, 360, 370, 380, 390, 400, 410, 420, 430, 440, 450, 460, 470, 480, 490, 500, 510, 520, 530, 540, 550, 560, 570, 580, 590, 600, 610, 620, 630, 640, 650, 660, 670, 680, 690, 700, 710, 720, 730, 740, 750, 760, 770, 780, 790, 800, 810, 820, 830, 840, 850, 860, 870, 880, 890, 900, 910, 920, 930, 940, 950, 960, 970, 980, 990, 1000 bases in length, or any range or value therein; about 50, 51, 52, 53, 54, 55, 56, 57, 58, 59, 60, 61, 62, 63, 64, 65, 66, 67, 68, 69, 70, 71, 72, 73, 74, 75, 76, 77, 78, 79, 80, 81, 82, 83, 84, 85, 86, 87, 88, 89, 90, 91, 92, 93, 94, 95, 96, 97, 98, 99, 100, 110, 120, 130, 140, 150, 160, 170, 180, 190, 200, 210, 220, 230, 240, 250, 260, 270, 280, 290, 300 bases to about 310, 320, 330, 340, 350, 360, 370, 380, 390, 400, 410, 420, 430, 440, 450, 460, 470, 480, 490, 500, 510, 520, 530, 540, 550, 560, 570, 580, 590, 600, 610, 620, 630, 640, 650, 660, 670, 680, 690, 700, 710, 720, 730, 740, 750, 760, 770, 780, 790, 800, 810, 820, 830, 840, 850, 860, 870, 880, 890, 900, 910, 920, 930, 940, 950, 960, 970, 980, 990, 1000, 1100, 1200, 1300, 1400, 1500, 1600, 1700, 1800, 1900, 2000 bases or more in length, or any value or range therein; about 500, 510, 520, 530, 540, 550, 560, 570, 580, 590, 600, 610, 620, 630, 640, 650, 660, 670, 680, 690, 700, 710, 720, 730, 740, 750, 760, 770, 780, 790, 800, 810, 820, 830, 840, 850, 860, 870, 880, 890, 900, 910, 920, 930, 940, 950, 960, 970, 980, 990, 1000, 1100, 1200, 1300, 1400, 1500, 1600, 1700, 1800, 1900, 2000 bases to about 2500, 3000, 3500, 4000, 4500, 5000, 5500, 6000, 6500, 7000, 7500, 8000, 8500, 9000, 9500, or 10,000 bases or more in length, or any value or range therein; or about 400, 410, 420, 430, 440, 450, 460, 470, 480, 490, 500, 510, 520, 530, 540, 550, 560, 570, 580, 590, 600, 610, 620, 630, 640, 650, 660, 670, 680, 690, or 700 bases to about 710, 720, 730, 740, 750, 760, 770, 780, 790, 800, 810, 820, 830, 840, 850, 860, 870, 880, 890, 900, 910, 920, 930, 940, 950, 960, 970, 980, 990, 1000, 1100, 1200, 1300, 1400, 1500, 1600, 1700, 1800, 1900, 2000, 2500, 3000, 3500, 4000, 4500, or 5000 bases or more in length, or any value or range therein. In some embodiments, an insertion or deletion may be about 1000, 1100, 1200, 1300, 1400, 1500, 1600, 1700, 1800, 1900, 2000, 2500, 3000, 3500, 4000, 4500, 5000, 5500, 6000, 6500, 7000, 7500, 8000, 8500, 9000, 9500, or 10,000 bases to about 10,500, 11,000, 11,500, 12,000, 12,500, 13,000, 13,500, 14,000, 14,500, 15,000, 15,500, 16,000, 16,500, 17,000, 17,500, 18,000, 18,500, 19,000, 19,500, 20,000, 20,500, 21,000, 21,500, 22,000, 22,500, 23,000, 23,500, 24,000, 24,500, 25,000, 25,500, 26,000, 26,500, 27,000, 27,500, 28,000, 28,500, 29,000, 29,500, or 30,000 bases or more in length, or any value or range therein.

[0110] “Recruit,” “recruiting” or “recruitment” as used herein refer to attracting one or more polypeptide(s) or polynucleotide(s) to another polypeptide or polynucleotide (e.g., to a particular location in a genome) using protein-protein interactions, nucleic acid-protein interactions (e.g., RNA-protein interactions), and/or chemical interactions. Protein-protein interactions can include, but are not limited to, peptide tags (epitopes, multimerized epitopes) and corresponding affinity polypeptides, RNA recruiting motifs and corresponding affinity polypeptides, and/or chemical interactions. Example chemical interactions that may be useful with polypeptides and polynucleotides for the purpose of recruitment can include, but are not limited to, rapamycin-inducible dimerization of FRB-FKBP; Biotin-streptavidin interaction; SNAP tag (Hussain et al. Curr Pharm Des. 19 (30): 5437-42 (2013)); Halo tag (Los et al. ACS Chem Biol. 3 (6): 373-82 (2008)); CLIP tag (Gautier et al. Chemistry & Biology 15:128-136 (2008)); DmrA-DmrC heterodimer induced by a compound (Tak et al. Nat Methods 14 (12): 1163-1166 (2017)); and/or bifunctional ligand approaches (e.g., chemically induced dimerization (Voß et al. Curr Opin Chemical Biology 28:194-201 (2015) (e.g. dihyrofolate reductase (DHFR) (Kopyteck et al. Cell Cehm Biol 7 (5): 313-321 (2000)). In some embodiments, a recruiting method and/or system of the present invention uses a protein-protein interaction and/or nucleic acid-protein interaction (e.g., RNA-protein interactions) to attract a polypeptide or polynucleotide to another polypeptide or polynucleotide (e.g., to a particular location in a genome).

[0111] “Introducing,” “introduce,” “introduced” (and grammatical variations thereof) in the context of a polynucleotide of interest or editing system means presenting a nucleotide sequence of interest (e.g., polynucleotide, a nucleic acid construct, and/or a guide nucleic acid) and/or editing system (e.g., a polynucleotide, polypeptide, and/or ribonucleoprotein) to a host organism or cell of said organism (e.g., host cell; e.g., a plant cell) in such a manner that the nucleotide sequence and/or editing system gains access to the interior of a cell. Thus, for example, a nucleic acid construct of the invention encoding a fusion protein of the present invention and/or a guide nucleic acid may be introduced into a cell of an organism, thereby transforming the cell with the polypeptide, CRISPR-Cas effector protein, guide nucleic acid, and reverse transcriptase. In some embodiments, a fusion protein of the present invention and/or a guide nucleic acid may be introduced into a cell of an organism, optionally wherein the polypeptide and guide nucleic acid may be comprised in a complex (e.g., a ribonucleoprotein). In some embodiments, the organism is a eukaryote (e.g., a mammal such as a human).

[0112] The term “transformation” as used herein refers to the introduction of a nucleic acid, polypeptide, and/or ribonucleoprotein (e.g., a heterologous nucleic acid, polypeptide, and/or ribonucleoprotein) into a cell. Transformation of a cell may be stable or transient. Thus, in some embodiments, a host cell or host organism may be stably transformed with a polynucleotide/nucleic acid molecule of the invention. In some embodiments, a host cell or host organism may be transiently transformed with a nucleic acid construct, a polypeptide, and/or a ribonucleoprotein of the invention.

[0113] “Transient transformation” in the context of a polynucleotide, polypeptide, and/or ribonucleoprotein means that a polynucleotide, polypeptide, and/or ribonucleoprotein is introduced into the cell and does not integrate into the genome of the cell.

[0114] By “stably introducing” or “stably introduced” in the context of a polynucleotide introduced into a cell is intended that the introduced polynucleotide is stably incorporated into the genome of the cell, and thus the cell is stably transformed with the polynucleotide.

[0115] “Stable transformation” or “stably transformed” as used herein means that a nucleic acid molecule is introduced into a cell and integrates into the genome of the cell. As such, the integrated nucleic acid molecule is capable of being inherited by the progeny thereof, more particularly, by the progeny of multiple successive generations. “Genome” as used herein includes the nuclear and the plastid genome, and therefore includes integration of the nucleic acid into, for example, the chloroplast or mitochondrial genome. Stable transformation as used herein can also refer to a transgene that is maintained extrachromasomally, for example, as a minichromosome or a plasmid.

[0116] Transient transformation may be detected by, for example, an enzyme-linked immunosorbent assay (ELISA) or western blot, which can detect the presence of a peptide or polypeptide encoded by one or more transgene introduced into an organism. Stable transformation of a cell can be detected by, for example, a Southern blot hybridization assay of genomic DNA of the cell with nucleic acid sequences which specifically hybridize with a nucleotide sequence of a transgene introduced into an organism (e.g., a mammal, plant, etc.). Stable transformation of a cell can be detected by, for example, a northern blot hybridization assay of RNA of the cell with nucleic acid sequences which specifically hybridize with a nucleotide sequence of a transgene introduced into a host organism. Stable transformation of a cell can also be detected by, e.g., a polymerase chain reaction (PCR) or other amplification reactions as are well known in the art, employing specific primer sequences that hybridize with target sequence(s) of a transgene, resulting in amplification of the transgene sequence, which can be detected according to standard methods. Transformation can also be detected by direct sequencing and/or hybridization protocols well known in the art.

[0117] Accordingly, in some embodiments, nucleotide sequences, polynucleotides, nucleic acid constructs, and/or expression cassettes of the invention may be expressed transiently and/or they can be stably incorporated into the genome of the host organism. Thus, in some embodiments, a nucleic acid construct of the invention may be transiently introduced into a cell with a guide nucleic acid and as such, no DNA maintained in the cell.

[0118] A nucleic acid construct, polypeptide, and/or ribonucleoprotein of the invention can be introduced into a cell by any method known to those of skill in the art. In some embodiments, transformation methods include, but are not limited to, transformation via bacterial-mediated nucleic acid delivery (e.g., via Agrobacteria), viral-mediated nucleic acid delivery, silicon carbide and/or nucleic acid whisker-mediated nucleic acid delivery, liposome mediated nucleic acid delivery, microinjection, microparticle bombardment, calcium-phosphate-mediated transformation, cyclodextrin-mediated transformation, electroporation, nanoparticle-mediated transformation, sonication, infiltration, PEG-mediated nucleic acid uptake, as well as any other electrical, chemical, physical (mechanical) and/or biological mechanism that results in the introduction of nucleic acid into the cell (e.g., a plant cell or an animal cell), including any combination thereof. In some embodiments of the invention, transformation of a cell comprises nuclear transformation. In some embodiments, transformation of a cell comprises plastid transformation (e.g., chloroplast transformation). In some embodiments, a recombinant nucleic acid construct of the invention can be introduced into a cell via conventional breeding techniques.

[0119] Procedures for transforming both eukaryotic and prokaryotic organisms are well known and routine in the art and are described throughout the literature (See, for example, Jiang et al. 2013. Nat. Biotechnol. 31:233-239; Ran et al. Nature Protocols 8:2281-2308 (2013)). General guides to various plant transformation methods known in the art include Miki et al. (“Procedures for Introducing Foreign DNA into Plants” in Methods in Plant Molecular Biology and Biotechnology, Glick, B. R. and Thompson, J. E., Eds. (CRC Press, Inc., Boca Raton, 1993), pages 67-88) and Rakowoczy-Trojanowska (Cell. Mol. Biol. Lett. 7:849-858 (2002)).

[0120] A nucleotide sequence, polypeptide, and/or ribonucleoprotein therefore can be introduced into a host organism or its cell in any number of ways that are well known in the art. The methods of the invention do not depend on a particular method for introducing one or more nucleotide sequence(s), polypeptide(s), and/or ribonucleoprotein(s) into the organism, only that they gain access to the interior of at least one cell of the organism. Where more than one nucleotide sequence, polypeptide, and/or ribonucleoprotein is to be introduced, they can be assembled as part of a single nucleic acid construct, or as separate nucleic acid constructs, and can be located on the same or different nucleic acid constructs. Accordingly, a nucleotide sequence, polypeptide, and/or ribonucleoprotein can be introduced into the cell of interest in a single transformation event, and/or in separate transformation events, or, alternatively, where relevant, a nucleotide sequence can be incorporated into a plant, for example, as part of a breeding protocol. In some embodiments, the cell is a eukaryotic cell (e.g., a plant cell or a mammalian such as a human cell).

[0121] In some embodiments, a nucleic acid construct of the invention (e.g., a polynucleotide encoding a fusion protein of the present invention, and/or a guide nucleic acid and/or expression cassettes and/or vectors comprising the same) may be operably linked to at least one regulatory sequence, optionally, wherein the at least one regulatory sequence may be codon optimized for expression in a plant. In some embodiments, the at least one regulatory sequence may be, for example, a promoter, an operon, a terminator, or an enhancer. In some embodiments, the at least one regulatory sequence may be a promoter. In some embodiments, the regulatory sequence may be an intron. In some embodiments, the at least one regulatory sequence may be, for example, a promoter operably associated with an intron or a promoter region comprising an intron. In some embodiments, the at least one regulatory sequence may be, for example a ubiquitin promoter and its associated intron (e.g., Medicago truncatula and/or Zea mays and their associated introns). In some embodiments, at least one regulatory sequence may be a terminator nucleotide sequence and/or an enhancer nucleotide sequence.

[0122] In some embodiments, a nucleic acid construct of the invention may be operably associated with a promoter region, wherein the promoter region comprises an intron, optionally wherein the promoter region may be a ubiquitin promoter and intron (e.g., a Medicago or a maize ubiquitin promoter and intron, e.g., SEQ ID NO:37 or SEQ ID NO:38). In some embodiments, the nucleic acid construct of the invention that is operably associated with a promoter region comprising an intron may be codon optimized for expression in a plant.

[0123] In some embodiments, a nucleic acid construct of the invention may encode one or more (e.g., 1, 2, 3, 4, or more) polypeptide(s) of interest. The one or more polypeptides of interest may be codon optimized for expression in a eukaryote (e.g., a human or a plant). In some embodiments, a fusion protein of the present invention may comprise one or more (e.g., 1, 2, 3, 4, or more) polypeptide(s) of interest.

[0124] A polypeptide of interest useful with this invention can include, but is not limited to, a polypeptide or protein domain having deaminase activity, nickase activity, recombinase activity, transposase activity, methylase activity, glycosylase (DNA glycosylase) activity, glycosylase inhibitor activity (e.g., uracil-DNA glycosylase inhibitor (UGI)), a reverse transcriptase, a peptide tag (e.g., a GCN4 peptide tag), demethylase activity, transcription activation activity, transcription repression activity, transcription release factor activity, histone modification activity, nuclease activity, single-strand RNA cleavage activity, double-strand RNA cleavage activity, restriction endonuclease activity (e.g., Fok1), nucleic acid binding activity, methyltransferase activity, DNA repair activity, DNA damage activity, dismutase activity, alkylation activity, depurination activity, oxidation activity, pyrimidine dimer forming activity, integrase activity, transposase activity, polymerase activity, ligase activity, helicase activity, a nuclear localization sequence or activity, an affinity polypeptide, a peptide tag, and/or photolyase activity. In some embodiments, the polypeptide of interest is a Fok1 nuclease, or a uracil-DNA glycosylase inhibitor. When encoded in a nucleic acid (polynucleotide, expression cassette, and/or vector) the encoded polypeptide or protein domain may be codon optimized for expression in an organism.

[0125] In some embodiments, an editing system of the present invention comprises a fusion protein of the present invention that comprises a CRISPR-Cas effector protein. As used herein, a “CRISPR-Cas effector protein” is a protein or polypeptide that cleaves, cuts, or nicks a nucleic acid; binds a nucleic acid (e.g., a target nucleic acid and/or a guide nucleic acid); and/or that identifies, recognizes, or binds a guide nucleic acid as defined herein. In some embodiments, a CRISPR-Cas effector protein may be an enzyme (e.g., a nuclease, endonuclease, nickase, etc.) and/or may function as an enzyme. In some embodiments, a CRISPR-Cas effector protein refers to a CRISPR-Cas nuclease. In some embodiments, a CRISPR-Cas effector protein comprises nuclease activity and/or nickase activity, comprises a nuclease domain whose nuclease activity and/or nickase activity has been reduced or eliminated, comprises single stranded DNA cleavage activity (ss DNAse activity) or which has ss DNAse activity that has been reduced or eliminated, and/or comprises self-processing RNAse activity or which has self-processing RNAse activity that has been reduced or eliminated. A CRISPR-Cas effector protein may bind to a target nucleic acid. A CRISPR-Cas effector protein may be a Type I, II, III, IV, V, or VI CRISPR-Cas effector protein. In some embodiments, a CRISPR-Cas effector protein may be from a Type I CRISPR-Cas system, a Type II CRISPR-Cas system, a Type III CRISPR-Cas system, a Type IV CRISPR-Cas system, Type V CRISPR-Cas system, or a Type VI CRISPR-Cas system. In some embodiments, a CRISPR-Cas effector protein may be from a Type II CRISPR-Cas system or a Type V CRISPR-Cas system. In some embodiments, a CRISPR-Cas effector protein may be a Type II CRISPR-Cas effector protein, for example, a Cas9 effector protein. In some embodiments, a CRISPR-Cas effector protein may be Type V CRISPR-Cas effector protein, for example, a Cas12 effector protein. In some embodiments, a CRISPR-Cas effector protein may be Cas12a and optionally may have an amino acid sequence of any one of SEQ ID NOs:39-65 and/or a nucleotide sequence of any one of SEQ ID NOs:66-69. In some embodiments, a CRISPR-Cas effector protein may be an active Cas12a and optionally may have an amino acid sequence of SEQ ID NO:46, 55 or 56. In some embodiments, a CRISPR-Cas effector protein may be an inactive (i.e., dead) Cas12a and optionally may have an amino acid sequence of SEQ ID NO:59, 60, or 61. In some embodiments, a CRISPR-Cas effector protein may be Cas12b and optionally may have an amino acid sequence of SEQ ID NO:70. In some embodiments, a CRISPR-Cas effector protein may be Cas12f and optionally may have an amino acid sequence of SEQ ID NO:71. In some embodiments, a CRISPR-Cas effector protein may be Cas12i and optionally may have an amino acid sequence of SEQ ID NO:72.

[0126] Exemplary CRISPR-Cas effector proteins include, but are not limited to, a Cas9, C2c1, C2c3, Cas12a (also referred to as Cpf1), Cas12b, Cas12c, Cas12d, Cas12e, Cas13a, Cas13b, Cas13c, Cas13d, Cas1, Cas1B, Cas2, Cas3, Cas3′, Cas3″, Cas4, Cas5, Cas6, Cas7, Cas8, Cas9 (also known as Csn1 and Csx12), Cas10, Csy1, Csy2, Csy3, Csc1, Csc2, Csc1, Csc2, Csa5, Csn2, Csm2, Csm3, Csm4, Csm5, Csm6, Cmr1, Cmr3, Cmr4, Cmr5, Cmr6, Csb1, Csb2, Csb3, Csx17, Csx14, Csx10, Csx16, CsaX, Csx3, Csx1, Csx15, Csf1, Csf2, Csf3, Csf4 (dinG), and/or Csf5 nuclease, optionally wherein the CRISPR-Cas effector protein may be a Cas9, Cas12a (Cpf1), Cas12b, Cas12c (C2c3), Cas12d (CasY), Cas12c (CasX), Cas12g, Cas12h, Cas12i, C2c4, C2c5, C2c8, C2c9, C2c10, Cas14a, Cas14b, and/or Cas14c effector protein.

[0127] In some embodiments, a CRISPR-Cas effector protein useful with the invention may comprise a mutation in its nuclease active site and/or nuclease domain (e.g., a RuvC, HNH, e.g., a RuvC site of a Cas12a nuclease domain, e.g., a RuvC site and/or HNH site of a Cas9 nuclease domain). A CRISPR-Cas effector protein having a mutation in its nuclease active site and/or nuclease domain that causes the protein to not have nuclease activity, is commonly referred to as “inactive” or “dead,” e.g., dCas9. In some embodiments, a CRISPR-Cas effector protein having a mutation in its nuclease active site and/or nuclease domain may have impaired activity or reduced activity (e.g., nickase activity) as compared to the same CRISPR-Cas effector protein without the mutation.

[0128] A CRISPR Cas9 effector protein or Cas9 useful with this invention may be any known or later identified Cas9 nuclease. In some embodiments, a Cas9 may be a protein from, for example, Streptococcus spp. (e.g., S. pyogenes, S. thermophilus), Lactobacillus spp., Bifidobacterium spp., Kandleria spp., Leuconostoc spp., Oenococcus spp., Pediococcus spp., Weissella spp., and/or Olsenella spp. In some embodiments, a CRISPR-Cas effector protein may be a Cas9 and optionally may have a nucleotide sequence of any one of SEQ ID NOs:73-87 and/or an amino acid sequence of any one of SEQ ID NOs:88-97.

[0129] In some embodiments, the CRISPR-Cas effector protein may be a Cas9 derived from Streptococcus pyogenes and/or may recognize the PAM sequence motif NGG, NAG, NGA (Mali et al, Science 2013; 339 (6121): 823-826). In some embodiments, the CRISPR-Cas effector protein may be a Cas9 derived from Streptococcus thermophiles and/or may recognize the PAM sequence motif NGGNG and/or NNAGAAW (W=A or T) (See, e.g., Horvath et al, Science, 2010; 327 (5962): 167-170, and Deveau et al, J Bacteriol 2008; 190 (4): 1390-1400). In some embodiments, the CRISPR-Cas effector protein may be a Cas9 derived from Streptococcus mutans and/or may recognize the PAM sequence motif NGG and/or NAAR (R=A or G) (See, e.g., Deveau et al, J BACTERIOL 2008; 190 (4): 1390-1400). In some embodiments, the CRISPR-Cas effector protein may be a Cas9 derived from Streptococcus aureus and/or may recognize the PAM sequence motif NNGRR (R=A or G). In some embodiments, the CRISPR-Cas effector protein may be a Cas9 derived from S. aureus and/or may recognize the PAM sequence motif NGRRT (R=A or G). In some embodiments, the CRISPR-Cas effector protein may be a Cas9 derived from S. aureus and/or may recognize the PAM sequence motif NGRRV (R=A or G). In some embodiments, the CRISPR-Cas effector protein may be a Cas9 that is derived from Neisseria meningitidis and/or may recognize the PAM sequence motif NGATT or NGCTT (R=A or G, V=A, G or C) (See, e.g., Hou et ah, PNAS 2013, 1-6). In the aforementioned embodiments in this paragraph, N in the PAM sequence motif can be any nucleotide residue, e.g., any of A, G, C or T. In some embodiments, the CRISPR-Cas effector protein may be a Cas13a derived from Leptotrichia shahii and/or may recognize a protospacer flanking sequence (PFS) (or RNA PAM (rPAM)) sequence motif of a single 3′ A, U, or C, which may be located within the target nucleic acid.

[0130] A Type V CRISPR-Cas effector protein useful with embodiments of the invention may be any Type V CRISPR-Cas nuclease. Exemplary Type V CRISPR-Cas effector proteins include, but are not limited to, Cas12a (Cpf1), Cas12b, Cas12c (C2c3), Cas12d (CasY), Cas12c (CasX), Cas12g, Cas12h, Cas12i, C2c1, C2c4, C2c5, C2c8, C2c9, C2c10, Cas14a, Cas14b, and/or Cas14c nuclease. In some embodiments, a Type V CRISPR-Cas effector protein may be a Cas12a. In some embodiments, a Type V CRISPR-Cas effector protein may be a nickase, optionally, a Cas12a nickase.

[0131] In some embodiments, the CRISPR-Cas effector protein may be a Type V Clustered Regularly Interspaced Short Palindromic Repeats (CRISPR)-Cas nuclease. Cas12a differs in several respects from the more well-known Type II CRISPR Cas9 nuclease. For example, Cas9 recognizes a G-rich protospacer-adjacent motif (PAM) that is 3′ to its guide RNA (gRNA, sgRNA, crRNA, crDNA, CRISPR array) binding site (protospacer, target nucleic acid, target DNA) (3′-NGG), while Cas12a recognizes a T-rich PAM that is located 5′ to the target nucleic acid (5′-TTN, 5′-TTTN. In fact, the orientations in which Cas9 and Cas12a bind their guide RNAs are very nearly reversed in relation to their N and C termini. Furthermore, Cas12a enzymes use a single guide RNA (gRNA, CRISPR array, crRNA) rather than the dual guide RNA (sgRNA (e.g., crRNA and tracrRNA)) found in natural Cas9 systems, and Cas12a processes its own gRNAs. Additionally, Cas12a nuclease activity produces staggered DNA double stranded breaks instead of blunt ends produced by Cas9 nuclease activity, and Cas12a relies on a single RuvC domain to cleave both DNA strands, whereas Cas9 utilizes an HNH domain and a RuvC domain for cleavage.

[0132] A CRISPR Cas12a effector protein useful with this invention may be any known or later identified Cas12a (previously known as Cpf1) (see, e.g., U.S. Pat. No. 9,790,490, which is incorporated by reference for its disclosures of Cpf1 (Cas12a) sequences). The term “Cas12a” refers to an RNA-guided protein that can have nuclease activity, the protein comprising a guide nucleic acid binding domain and an active, inactive, or partially active DNA cleavage domain, thereby the RNA-guided nuclease activity of the Cas12a may be active, inactive or partially active, respectively. In some embodiments, a Cas12a useful with the invention may comprise a mutation in the nuclease active site (e.g., a RuvC site of the Cas12a domain). A Cas12a having a mutation in its nuclease domain and/or nuclease active site, and therefore, no longer comprising nuclease activity, is commonly referred to as deadCas12a (e.g., dCas12a). In some embodiments, a Cas12a having a mutation in its nuclease domain and/or nuclease active site may have impaired activity, e.g., may have reduced nickase activity. In some embodiments, a Cas12a may have an amino acid sequence of any one of SEQ ID NOs:39-65 or 299-301.

[0133] In some embodiments, a CRISPR-Cas effector protein is an engineered protein that has an amino acid sequence having at least 70%, 75%, 80%, 85%, 90%, 95%, 96%, 97%, 98%, 99%, or more sequence identity to one or more of SEQ ID NOs:98-189 and/or 280-287. In some embodiments, a CRISPR-Cas effector protein is an engineered protein (e.g., an engineered CRISPR-Cas effector protein) that comprises (i) a CRISPR-Cas effector polypeptide (e.g., a Cas12a polypeptide and/or domain) and (ii) a polypeptide that is heterologous to the CRISPR-Cas effector polypeptide. The CRISPR-Cas effector polypeptide may be a portion of a CRISPR-Cas effector protein (e.g., a wild-type Cas12a or inactivated Cas12a). For example, an engineered CRISPR-Cas effector protein may comprise (i) a portion of any one of SEQ ID NOs:39-65 or 299-301 and (ii) a polypeptide that is heterologous to the portion of any one of SEQ ID NOs:39-65 or 299-301. In some embodiments, an engineered CRISPR-Cas effector protein comprises at least one non-natural mutation compared to a CRISPR-Cas effector protein (e.g., a wild-type Cas12a or inactivated Cas12a). In some embodiments, an engineered CRISPR-Cas effector protein has a similar structure and/or function compared to a wild-type CRISPR-Cas effector protein and/or comprises all or a portion of a wild-type CRISPR-Cas effector protein or inactivated CRISPR-Cas effector protein. In some embodiments, an engineered CRISPR-Cas effector protein is not found in nature (e.g., comprises a non-natural mutation) and may be modified (e.g., mutated) compared to a wild-type CRISPR-Cas effector protein and/or inactivated CRISPR-Cas effector protein. In some embodiments, an engineered CRISPR-Cas effector protein comprises a Cas12a polypeptide and is devoid of a portion of a Cas12a. In some embodiments, an engineered CRISPR-Cas effector protein comprises a Cas12a polypeptide and a domain that is not present in a Cas12a. In some embodiments, an engineered CRISPR-Cas effector protein comprises all or a portion of a wedge domain, a Rec1 domain, a Rec2 domain, a PAM-interacting domain, a RuvC domain, a bridge helix, and/or a Nuc domain each of which may be from a Cas12a and/or a protein having a sequence of any one of SEQ ID NOs:39-65 or 299-301. In some embodiments, an engineered CRISPR-Cas effector protein comprises all or a portion of a Cas12a domain having a structure as described in Yamano, Takashi, et al., Mol Cell 67:633-645 (2017).

[0134] In some embodiments, an engineered CRISPR-Cas effector protein comprises all or a portion of an alpha-helical recognition (REC) lobe, optionally wherein the domains of all or a portion of the REC lobe in the engineered protein may be in a different order and/or structure than in a Cas12a. A REC lobe may contain a Rec1 domain and Rec2 domain. A Rec1 domain may comprise 13 alpha helices and/or a Rec2 domain may comprise 10 alpha helices and two beta strands that may form a small antiparallel sheet. In some embodiments, an engineered CRISPR-Cas effector protein comprises an HNH domain (e.g., an HNH domain of a Cas9, optionally Cas9 having a sequence of any one of SEQ ID NOs:88-97) between a first polypeptide comprising all or a portion of a Rec1 domain and a second polypeptide comprising all or a portion of a Rec2 domain, wherein first and second polypeptides may each independently be from a Cas12a and/or a protein having a sequence of any one of SEQ ID NOs:39-65 or 299-301. In some embodiments, an engineered CRISPR-Cas effector protein comprises all or a portion of a RuvC domain. In some embodiments, an engineered CRISPR-Cas effector protein comprises an HNH domain (e.g., an HNH domain of a Cas9, optionally Cas9 having a sequence of any one of SEQ ID NOs:88-97) between a first polypeptide comprising all or a portion of a Rec1 domain and a second polypeptide comprising all or a portion of a Rec2 domain, wherein first and second polypeptides may each independently be from a Cas12a and/or a protein having a sequence of any one of SEQ ID NOs:39-65 or 299-301, and the engineered protein may comprise all or a portion of a RuvC domain. In some embodiments, an engineered CRISPR-Cas effector protein is as described in U.S. Patent Application Publication No. 2002/0112473 and/or PCT/US2023/063398. As one of skill in the art would understand, some domains (e.g., the wedge and RuvC domains of Cas12a) are not continuous in sequence and may be split into two or more (e.g., 2, 3, 4, or more) non-continuous sequences. In some embodiments, an engineered CRISPR-Cas effector protein comprises a Cas12a domain.

[0135] In some embodiments, an engineered CRISPR-Cas effector protein comprises, optionally in the N- to C-terminus direction, all or a portion of one or more of the following: first portion of the wedge domain (WED-1), Rec1 domain, Rec2 domain, second portion of the wedge domain (WED-2), PAM-interacting domain (PI), third portion of the wedge domain (WED-3), first portion of the RuvC domain (RuvC-1), bridge helix, second portion of the RuvC domain (RuvC-2), Nuc domain, and/or third portion of the RuvC domain (RuvC-3). For example, based on SEQ ID NO:69, an engineered CRISPR-Cas effector protein may be encoded by all or a portion of one or more of the following: nucleotides 1-69 making up WED-1, nucleotides 70-1,560 making up the REC lobe, nucleotides 1,561-1,755 making up WED-2, nucleotides 1,756-2,031 making up PI, nucleotides 2,032-2,421 WED-3, nucleotides 2,422-2,613 making up RuvC-1, nucleotides 2,614-2,667 making up the bridge helix, nucleotides 2,668-2,988 making up RuvC-2, nucleotides 2,989-3,534 making up Nuc domain, and/or nucleotides 3,535-3,681 making up RuvC-3. As another example, based on SEQ ID NO:56, an engineered CRISPR-Cas effector protein may comprise, optionally in the N- to C-terminus direction, all or a portion of one or more of the following: amino acid residues 1-23 making up WED-1, amino acid residues 24-520 making up the REC lobe, amino acid residues 521-585 making up WED-2, amino acid residues 586-677 making up PI, amino acid residues 678-807 WED-3, amino acid residues 808-871 making up RuvC-1, amino acid residues 872-889 making up the bridge helix, amino acid residues 890-996 making up RuvC-2, amino acid residues 997-1,178 making up Nuc domain, and/or amino acid residues 1,179-1,227 making up RuvC-3.

[0136] In some embodiments, an engineered CRISPR-Cas effector protein comprises all or a portion of an active RuvC domain. In some embodiments, an engineered CRISPR-Cas effector protein comprises all or a portion of an inactivated RuvC domain, optionally all or a portion of an inactivated RuvC domain that has a D10A mutation. In some embodiments, an engineered CRISPR-Cas effector protein comprises all or a portion of an inactivated RuvC domain and has an alanine at a position corresponding to amino acid residue 831 of SEQ ID NO:59 when the engineered protein is optimally aligned to SEQ ID NO:59, optionally wherein the mutation is referred to as a D10A and/or D832A mutation. In some embodiments, an engineered CRISPR-Cas effector protein comprises a polypeptide that comprises all or a portion of an inactivated RuvC domain and has a mutation of: D832A and/or E925A with reference to position numbering of SEQ ID NO:44, 45, 55, 56, and/or 59 (LbCas12a), D908A and/or E993A with reference to position numbering of SEQ ID NO:39 (AsCas12a), D917A and/or E1006A with reference to position numbering of SEQ ID NO:43 and/or 58 (FnCas12a), or a mutation corresponding thereto.

[0137] In some embodiments, a CRISPR-Cas effector protein (e.g., an engineered CRISPR-Cas effector protein) is a target strand nickase and/or a non-target strand nickase. In some embodiments, a CRISPR-Cas effector protein (e.g., an engineered CRISPR-Cas effector protein) is a non-target strand nickase.

[0138] In some embodiments, a CRISPR-Cas effector protein may be optimized for expression in an organism, for example, in an animal (e.g., a mammal such as a human), a plant, a fungus, an archacon, or a bacterium. In some embodiments, a CRISPR-Cas effector protein (e.g., Cas12a polypeptide/domain or a Cas9 polypeptide/domain) may be optimized for expression in a plant.

[0139] A polypeptide (e.g., fusion protein) of the present invention may be used in combination with a guide nucleic acid (e.g., guide RNA (gRNA), CRISPR array, CRISPR RNA, crRNA, or extended guide nucleic acid) that is designed to function with a CRISPR-Cas effector protein (e.g., the CRISPR-Cas effector protein present in the fusion protein) to modify a target nucleic acid. A guide nucleic acid useful with this invention may comprise at least one spacer sequence and at least one repeat sequence. The guide nucleic acid may be capable of forming a complex with a CRISPR-Cas effector protein (e.g., with a nuclease domain of the protein) and/or a fusion protein of the present invention and the spacer sequence is capable of hybridizing to a target nucleic acid, thereby guiding the complex to the target nucleic acid, wherein the target nucleic acid may be modified (e.g., cleaved or edited) and/or modulated (e.g., modulating transcription) by a fusion protein of the present invention, optionally present in and/or recruited to the complex).

[0140] In some embodiments, a CRISPR-Cas effector protein comprising a Cas9 domain (or a nucleic acid construct encoding the same) may be used in combination with a Cas9 guide nucleic acid to modify a target nucleic acid, and may be in or may form a complex.

[0141] Likewise, a CRISPR-Cas effector protein may comprise a Cas12a domain (or other selected CRISPR-Cas nuclease, e.g., C2c1, C2c3, Cas12b, Cas12c, Cas12d, Cas12f, Cas12i, Cas12e, Cas13a, Cas13b, Cas13c, Cas13d, Cas1, Cas1B, Cas2, Cas3, Cas3′, Cas3″, Cas4, Cas5, Cas6, Cas7, Cas8, Cas9 (also known as Csn1 and Csx12), Cas10, Csy1, Csy2, Csy3, Cse1, Cse2, Csc1, Csc2, Csa5, Csn2, Csm2, Csm3, Csm4, Csm5, Csm6, Cmr1, Cmr3, Cmr4, Cmr5, Cmr6, Csb1, Csb2, Csb3, Csx17, Csx14, Csx10, Csx16, CsaX, Csx3, Csx1, Csx15, Csf1, Csf2, Csf3, Csf4 (dinG), and/or Csf5), which may be used in combination with a Cas12a guide nucleic acid (or the guide nucleic acid for the other selected CRISPR-Cas nuclease) to modify a target nucleic acid, thereby editing the target nucleic acid.

[0142] A “guide nucleic acid,” “guide RNA,” “gRNA,” “CRISPR RNA/DNA” “crRNA” or “crDNA” as used herein means a nucleic acid that comprises at least one spacer sequence, which is complementary to (and hybridizes to) a target nucleic acid (e.g., a target DNA and/or a protospacer), and at least one repeat sequence (e.g., a repeat of a Type V Cas12a CRISPR-Cas system, or a fragment or portion thereof; a repeat of a Type II Cas9 CRISPR-Cas system, or fragment thereof; a repeat of a Type V C2c1 CRISPR Cas system, or a fragment thereof; a repeat of a CRISPR-Cas system of, for example, C2c3, Cas12a (also referred to as Cpf1), Cas12b, Cas12c, Cas12d, Cas12e, Cas12f, Cas12i, Cas13a, Cas13b, Cas13c, Cas13d, Cas1, Cas1B, Cas2, Cas3, Cas3′, Cas3″, Cas4, Cas5, Cas6, Cas7, Cas8, Cas9 (also known as Csn1 and Csx12), Cas10, Csy1, Csy2, Csy3, Cse1, Csc2, Csc1, Csc2, Csa5, Csn2, Csm2, Csm3, Csm4, Csm5, Csm6, Cmr1, Cmr3, Cmr4, Cmr5, Cmr6, Csb1, Csb2, Csb3, Csx17, Csx14, Csx10, Csx16, CsaX, Csx3, Csx1, Csx15, Csf1, Csf2, Csf3, Csf4 (dinG), and/or Csf5, or a fragment thereof), wherein the repeat sequence may be linked to the 5′ end and/or the 3′ end of the spacer sequence. In some embodiments, the guide nucleic acid comprises DNA. In some embodiments, the guide nucleic acid comprises RNA (e.g., is a guide RNA). The design of a gRNA of this invention may be based on a Type I, Type II, Type III, Type IV, Type V, or Type VI CRISPR-Cas system.

[0143] In some embodiments, a Cas12a gRNA may comprise, from 5′ to 3′, a repeat sequence (full length or portion thereof (“handle”); e.g., pseudoknot-like structure) and a spacer sequence.

[0144] In some embodiments, a guide nucleic acid may comprise more than one repeat sequence-spacer sequence (e.g., 2, 3, 4, 5, 6, 7, 8, 9, 10, or more repeat-spacer sequences) (e.g., repeat-spacer-repeat, e.g., repeat-spacer-repeat-spacer-repeat-spacer-repeat-spacer-repeat-spacer, and the like). The guide nucleic acids of this invention are synthetic, human-made and not found in nature. A gRNA can be quite long and may be used as an aptamer (like in the MS2 recruitment strategy) or other RNA structures hanging off the spacer.

[0145] A “repeat sequence” as used herein, refers to, for example, any repeat sequence of a wild-type CRISPR Cas locus (e.g., a Cas9 locus, a Cas12a locus, a C2c1 locus, etc.) or a repeat sequence of a synthetic crRNA that is functional with the CRISPR-Cas effector protein encoded by the nucleic acid constructs of the invention. A repeat sequence useful with this invention can be any known or later identified repeat sequence of a CRISPR-Cas locus (e.g., Type I, Type II, Type III, Type IV, Type V or Type VI) or it can be a synthetic repeat designed to function in a Type I, II, III, IV, V or VI CRISPR-Cas system. A repeat sequence may comprise a hairpin structure and/or a stem loop structure. In some embodiments, a repeat sequence may form a pseudoknot-like structure at its 5′ end (i.e., “handle”). Thus, in some embodiments, a repeat sequence can be identical to or substantially identical to a repeat sequence from wild-type Type I CRISPR-Cas loci, Type II, CRISPR-Cas loci, Type III, CRISPR-Cas loci, Type IV CRISPR-Cas loci, Type V CRISPR-Cas loci and/or Type VI CRISPR-Cas loci. A repeat sequence from a wild-type CRISPR-Cas locus may be determined through established algorithms, such as using the CRISPRfinder offered through CRISPRdb (see, Grissa et al. Nucleic Acids Res. 35 (Web Server issue): W52-7). In some embodiments, a repeat sequence or portion thereof is linked at its 3′ end to the 5′ end of a spacer sequence, thereby forming a repeat-spacer sequence (e.g., guide nucleic acid, guide RNA/DNA, crRNA, crDNA).

[0146] In some embodiments, a repeat sequence comprises, consists essentially of, or consists of at least 10 nucleotides depending on the particular repeat and whether the guide nucleic acid comprising the repeat is processed or unprocessed (e.g., about 10, 11, 12, 13, 14, 15, 16, 17, 18, 19, 20, 21, 22, 23, 24, 25, 26, 27, 28, 29, 30, 31, 32, 33, 34, 35, 36, 37, 38, 39, 40, 41, 42, 43, 44, 45, 46, 47, 48, 49, 50 to 100 or more nucleotides, or any range or value therein). In some embodiments, a repeat sequence comprises, consists essentially of, or consists of about 10 to about 20, about 10 to about 30, about 10 to about 45, about 10 to about 50, about 15 to about 30, about 15 to about 40, about 15 to about 45, about 15 to about 50, about 20 to about 30, about 20 to about 40, about 20 to about 50, about 30 to about 40, about 40 to about 80, about 50 to about 100 or more nucleotides.

[0147] A repeat sequence linked to the 5′ end of a spacer sequence can comprise a portion of a repeat sequence (e.g., 5, 6, 7, 8, 9, 10, 11, 12, 13, 14, 15, 16, 17, 18, 19, 20, 21, 22, 23, 24, 25, 26, 27, 28, 29, 30, 31, 32, 33, 34, 35 or more contiguous nucleotides of a wild-type repeat sequence). In some embodiments, a portion of a repeat sequence linked to the 5′ end of a spacer sequence can be about five to about ten consecutive nucleotides in length (e.g., about 5, 6, 7, 8, 9, 10 nucleotides) and have at least 90% sequence identity (e.g., at least about 90%, 91%, 92%, 93%, 94%, 95%, 96%, 97%, 98%, 99%, or more) to the same region (e.g., 5′ end) of a wild-type CRISPR Cas repeat nucleotide sequence. In some embodiments, a portion of a repeat sequence may comprise a pseudoknot-like structure at its 5′ end (e.g., “handle”).

[0148] A “spacer sequence” as used herein is a nucleotide sequence that is complementary to a target nucleic acid (e.g., target DNA) (e.g., protospacer). The spacer sequence can be fully complementary or substantially complementary (e.g., at least about 70% complementary (e.g., about 70%, 71%, 72%, 73%, 74%, 75%, 76%, 77%, 78%, 79%, 80%, 81%, 82%, 83%, 84%, 85%, 86%, 87%, 88%, 89%, 90%, 91%, 92%, 93%, 94%, 95%, 96%, 97%, 98%, 99%, or more)) to a target nucleic acid. Thus, in some embodiments, the spacer sequence can have one, two, three, four, or five mismatches as compared to the target nucleic acid, which mismatches can be contiguous or noncontiguous. In some embodiments, the spacer sequence can have 70% complementarity to a target nucleic acid. In other embodiments, the spacer nucleotide sequence can have 80% complementarity to a target nucleic acid. In still other embodiments, the spacer nucleotide sequence can have 85%, 90%, 95%, 96%, 97%, 98%, 99% or 99.5% complementarity, and the like, to the target nucleic acid (protospacer). In some embodiments, the spacer sequence is 100% complementary to the target nucleic acid. A spacer sequence may have a length from about 15 nucleotides to about 30 nucleotides (e.g., 15, 16, 17, 18, 19, 20, 21, 22, 23, 24, 25, 26, 27, 28, 29, or 30 nucleotides, or any range or value therein). Thus, in some embodiments, a spacer sequence may have complete complementarity or substantial complementarity over a region of a target nucleic acid (e.g., protospacer) that is at least about 15 nucleotides to about 30 nucleotides in length. In some embodiments, the spacer is about 20 nucleotides in length. In some embodiments, the spacer is about 21, 22, or 23 nucleotides in length.

[0149] In some embodiments, the 5′ region of a spacer sequence of a guide nucleic acid may be fully complementary to a target nucleic acid, while the 3′ region of the spacer may be substantially complementary to the target nucleic acid (such as for a spacer in a Type V CRISPR-Cas system), or the 3′ region of a spacer sequence of a guide nucleic acid may be fully complementary to a target nucleic acid, while the 5′ region of the spacer may be substantially complementary to the target nucleic acid (such as for a spacer in a Type II CRISPR-Cas system), and therefore, the overall complementarity of the spacer sequence to the target nucleic acid may be less than 100%. Thus, for example, in a guide nucleic acid for a Type V CRISPR-Cas system, the first 1, 2, 3, 4, 5, 6, 7, 8, 9, 10 nucleotides in the 5′ region (i.e., seed region) of, for example, a 20 nucleotide spacer sequence may be 100% complementary to the target nucleic acid, while the remaining nucleotides in the 3′ region of the spacer sequence are substantially complementary (e.g., at least about 70% complementary) to the target nucleic acid. In some embodiments, the first 1 to 8 nucleotides (e.g., the first 1, 2, 3, 4, 5, 6, 7, 8, nucleotides, and any range therein) of the 5′ end of the spacer sequence may be 100% complementary to the target nucleic acid, while the remaining nucleotides in the 3′ region of the spacer sequence are substantially complementary (e.g., at least about 50% complementary (e.g., 50%, 55%, 60%, 65%, 70%, 71%, 72%, 73%, 74%, 75%, 76%, 77%, 78%, 79%, 80%, 81%, 82%, 83%, 84%, 85%, 86%, 87%, 88%, 89%, 90%, 91%, 92%, 93%, 94%, 95%, 96%, 97%, 98%, 99%, or more)) to the target nucleic acid.

[0150] As a further example, in a guide nucleic acid for a Type II CRISPR-Cas system, the first 1, 2, 3, 4, 5, 6, 7, 8, 9, 10 nucleotides in the 3′ region (i.e., seed region) of, for example, a 20 nucleotide spacer sequence may be 100% complementary to the target nucleic acid, while the remaining nucleotides in the 5′ region of the spacer sequence are substantially complementary (e.g., at least about 70% complementary) to the target nucleic acid. In some embodiments, the first 1 to 10 nucleotides (e.g., the first 1, 2, 3, 4, 5, 6, 7, 8, 9, 10 nucleotides, and any range therein) of the 3′ end of the spacer sequence may be 100% complementary to the target nucleic acid, while the remaining nucleotides in the 5′ region of the spacer sequence are substantially complementary (e.g., at least about 50% complementary (e.g., at least about 50%, 55%, 60%, 65%, 70%, 71%, 72%, 73%, 74%, 75%, 76%, 77%, 78%, 79%, 80%, 81%, 82%, 83%, 84%, 85%, 86%, 87%, 88%, 89%, 90%, 91%, 92%, 93%, 94%, 95%, 96%, 97%, 98%, 99%, or more or any range or value therein)) to the target nucleic acid. A recruiting guide RNA further comprises one or more recruiting motifs as described herein, which may be linked to the 5′ end of the guide or the 3′ end or it may be inserted into the recruiting guide nucleic acid (e.g., within the hairpin loop).

[0151] In some embodiments, a seed region of a spacer may be about 8 to about 10 nucleotides in length, about 5 to about 6 nucleotides in length, or about 6 nucleotides in length.

[0152] In some embodiments, a guide nucleic acid further comprises a reverse transcriptase template and may be referred to as an extended guide nucleic acid.

[0153] A guide nucleic acid and/or an extended guide nucleic acid may comprise one or more recruiting motifs as described herein, which may be linked to the 5′ end and/or the 3′ end of the guide nucleic acid and/or it may be inserted into the guide nucleic acid (e.g., within a hairpin loop of the guide nucleic acid).

[0154] A “target nucleic acid”, “target DNA,” “target nucleotide sequence,” “target region,” and “target region in the genome” are used interchangeably herein and refer to a region of an organism's (e.g., a plant's) genome that comprises a sequence that is fully complementary (100% complementary) or substantially complementary (e.g., at least 70% complementary (e.g., 70%, 71%, 72%, 73%, 74%, 75%, 76%, 77%, 78%, 79%, 80%, 81%, 82%, 83%, 84%, 85%, 86%, 87%, 88%, 89%, 90%, 91%, 92%, 93%, 94%, 95%, 96%, 97%, 98%, 99%, or more)) to a spacer sequence in a guide nucleic acid as defined herein. A target nucleic acid is targeted by an editing system (or a component thereof) as described herein. A target region useful for a CRISPR-Cas system may be located immediately 3′ (e.g., Type V CRISPR-Cas system) or immediately 5′ (e.g., Type II CRISPR-Cas system) to a PAM sequence in the genome of the organism (e.g., a plant genome or mammalian (e.g., human) genome). A target region may be selected from any region of at least 15 consecutive nucleotides (e.g., 16, 17, 18, 19, 20, 21, 22, 23, 24, 25, 26, 27, 28, 29, 30 nucleotides, and the like) located immediately adjacent to a PAM sequence.

[0155] A “protospacer sequence” or “protospacer” as used herein refers to a sequence that is fully or substantially complementary to (and can hybridize to) a spacer sequence of a guide nucleic acid. In some embodiments, the protospacer is all or a portion of a target nucleic acid as defined herein that is fully or substantially complementary (and hybridizes) to the spacer sequence of the CRISPR repeat-spacer sequences (e.g., guide nucleic acids, CRISPR arrays, crRNAs).

[0156] In the case of Type V CRISPR-Cas (e.g., Cas12a) systems and Type II CRISPR-Cas (Cas9) systems, the protospacer sequence is flanked by (e.g., immediately adjacent to) a protospacer adjacent motif (PAM). For Type V CRISPR-Cas systems, the PAM is located at the 5′ end on the non-target strand and at the 3′ end of the target strand (see below, as an example).

```
      5′-NNNNNNNNNNNNNNNNNNN-3′ RNA Spacer
            |||||||||||||||||||
3′-AAANNNNNNNNNNNNNNNNNNN-5′ Target strand
      ||||
5′-TTTNNNNNNNNNNNNNNNNNNN-3′ Non-target strand
```

[0157] In the case of Type II CRISPR-Cas (e.g., Cas9) systems, the PAM is located immediately 3′ of the target region. The PAM for Type I CRISPR-Cas systems is located 5′ of the target strand. There is no known PAM for Type III CRISPR-Cas systems. Makarova et al. describes the nomenclature for all the classes, types and subtypes of CRISPR systems (Nature Reviews Microbiology 13:722-736 (2015)). Guide structures and PAMs are described by R. Barrangou (Genome Biol. 16:247 (2015)).

[0158] Canonical Cas12a PAMs are T rich. In some embodiments, a canonical Cas12a PAM sequence may be 5′-TTN, 5′-TTTN, or 5′-TTTV. In some embodiments, canonical Cas9 (e.g., S. pyogenes) PAMs may be 5′-NGG-3′. In some embodiments, non-canonical PAMs may be used but may be less efficient.

[0159] Additional PAM sequences may be determined by those skilled in the art through established experimental and computational approaches. Thus, for example, experimental approaches include targeting a sequence flanked by all possible nucleotide sequences and identifying sequence members that do not undergo targeting, such as through the transformation of target plasmid DNA (Esvelt et al. 2013. Nat. Methods 10:1116-1121; Jiang et al. 2013. Nat. Biotechnol. 31:233-239). In some aspects, a computational approach can include performing BLAST searches of natural spacers to identify the original target DNA sequences in bacteriophages or plasmids and aligning these sequences to determine conserved sequences adjacent to the target sequence (Briner and Barrangou. 2014. Appl. Environ. Microbiol. 80:994-1001; Mojica et al. 2009. Microbiology 155:733-740).

[0160] In some embodiments, the present invention provides expression cassettes and/or vectors comprising the nucleic acid constructs of the invention (e.g., one or more components of an editing system of the invention). In some embodiments, expression cassettes and/or vectors comprising the nucleic acid constructs of the invention and/or one or more guide nucleic acids may be provided. In some embodiments, a nucleic acid construct of the invention encodes a fusion protein of the present invention and one or more guide nucleic acids, which may be comprised on the same or on a separate expression cassette or vector from that comprising the one or more guide nucleic acids. When the nucleic acid construct encoding a fusion protein of the present invention or the components of an editing system is/are comprised on separate expression cassette(s) or vector(s) from that comprising the guide nucleic acid, a target nucleic acid may be contacted with (e.g., provided with) the expression cassette(s) or vector(s) encoding the fusion protein of the present invention or components of an editing system in any order from one another and the guide nucleic acid, e.g., prior to, concurrently with, or after the expression cassette comprising the guide nucleic acid is provided (e.g., contacted with the target nucleic acid).

[0161] Methods of recruiting one or more components of an editing system to each other and/or to a target nucleic acid are known in the art and may include the use of a peptide tag or an affinity polypeptide that interacts with the peptide tag. In some embodiments, a guide nucleic acid may be linked to an RNA recruiting motif and a fusion protein of the present invention may be linked to an affinity polypeptide capable of interacting with the RNA recruiting motif, thereby recruiting the fusion protein of the invention to the target nucleic acid. Alternatively, chemical interactions may be used to recruit a polypeptide (e.g., a fusion protein of the invention) to a target nucleic acid.

[0162] A “recruiting motif” as used herein refers to one half of a binding pair that may be used to recruit a compound to which the recruiting motif is bound to another compound that includes the other half of the binding pair (i.e., a “corresponding motif”). The recruiting motif and corresponding motif may bind noncovalently. In some embodiments, a recruiting motif is an RNA recruiting motif (e.g., an RNA recruiting motif that is capable of binding and/or configured to bind to an affinity polypeptide), an affinity polypeptide (e.g., an affinity polypeptide that is capable of binding and/or configured to bind an RNA recruiting motif and/or a peptide tag), or a peptide tag (e.g., a peptide tag that is capable of binding and/or configured to bind an affinity polypeptide). For example, when a recruiting motif is an RNA recruiting motif, the corresponding motif for the RNA recruiting motif may be an affinity polypeptide that binds the RNA recruiting motif. A further example is that when a recruiting motif is a peptide tag, the corresponding motif for the peptide tag may be an affinity polypeptide that binds the peptide tag. Thus, a compound comprising a recruiting motif (e.g., an affinity polypeptide) may be recruited to another compound (e.g., a guide nucleic acid) comprising a corresponding motif for the recruiting motif (e.g., an RNA recruiting motif).

[0163] A peptide tag (e.g., epitope) useful with this invention may include, but is not limited to, a GCN4 peptide tag (e.g., Sun-Tag), a c-Myc affinity tag, an HA affinity tag, a His affinity tag, an S affinity tag, a methionine-His affinity tag, an RGD-His affinity tag, a FLAG octapeptide, a strep tag or strep tag II, a V5 tag, and/or a VSV-G epitope. Any epitope that may be linked to a polypeptide and for which there is a corresponding affinity polypeptide that may be linked to another polypeptide may be used with this invention as a peptide tag. In some embodiments, a peptide tag may comprise 1 or 2 or more copies of a peptide tag (e.g., repeat unit, multimerized epitope (e.g., tandem repeats)) (e.g., 1, 2, 3, 4, 5, 6, 7, 8, 9, 10, 11, 12, 13, 14, 15, 16, 17, 18, 19, 20, 21, 22, 23, 24, 25 or more repeat units. In some embodiments, an affinity polypeptide that interacts with/binds to a peptide tag may be an antibody. In some embodiments, the antibody may be a scFv antibody. In some embodiments, an affinity polypeptide that binds to a peptide tag may be synthetic (e.g., evolved for affinity interaction) including, but not limited to, an affibody, an anticalin, a monobody and/or a DARPin (see, e.g., Sha et al., Protein Sci. 26 (5): 910-924 (2017)); Gilbreth (Curr Opin Struc Biol 22 (4): 413-420 (2013)), U.S. Pat. No. 9,982,053, each of which are incorporated by reference in their entireties for the teachings relevant to affibodies, anticalins, monobodies and/or DARPins.

[0164] In some embodiments, a guide nucleic acid may be linked to an RNA recruiting motif, and a polypeptide to be recruited (e.g., a fusion protein of the present invention) may be fused to an affinity polypeptide that binds to the RNA recruiting motif, wherein the guide binds to the target nucleic acid and the RNA recruiting motif binds to the affinity polypeptide, thereby recruiting the polypeptide to the guide and contacting the target nucleic acid with the polypeptide (e.g., a fusion protein of the present invention). In some embodiments, two or more polypeptides may be recruited to a guide nucleic acid, thereby contacting the target nucleic acid with two or more polypeptides (e.g., one or more fusion protein(s) of the present invention).

[0165] In some embodiments of the invention, a guide RNA may be linked to one or to two or more RNA recruiting motifs (e.g., 1, 2, 3, 4, 5, 6, 7, 8, 9, 10 or more motifs; e.g., at least 10 to about 25 motifs), optionally wherein the two or more RNA recruiting motifs may be the same RNA recruiting motif or different RNA recruiting motifs. In some embodiments, an RNA recruiting motif and corresponding affinity polypeptide may include, but is not limited, to a telomerase Ku binding motif (e.g., Ku binding hairpin) and the corresponding affinity polypeptide Ku (e.g., Ku heterodimer), a telomerase Sm7 binding motif and the corresponding affinity polypeptide Sm7, an MS2 phage operator stem-loop and the corresponding affinity polypeptide MS2 Coat Protein (MCP), a PP7 phage operator stem-loop and the corresponding affinity polypeptide PP7 Coat Protein (PCP), an SfMu phage Com stem-loop and the corresponding affinity polypeptide Com RNA binding protein, a PUF binding site (PBS) and the affinity polypeptide Pumilio/fem-3 mRNA binding factor (PUF), and/or a synthetic RNA-aptamer and the aptamer ligand as the corresponding affinity polypeptide. In some embodiments, the RNA recruiting motif and corresponding affinity polypeptide may be an MS2 phage operator stem-loop and the affinity polypeptide MS2 Coat Protein (MCP). In some embodiments, the RNA recruiting motif and corresponding affinity polypeptide may be a PUF binding site (PBS) and the affinity polypeptide Pumilio/fem-3 mRNA binding factor (PUF). Exemplary RNA recruiting motifs and corresponding affinity polypeptides that may be useful with this invention can include, but are not limited to, SEQ ID NOs:190-200.

[0166] In some embodiments, the components for recruiting polypeptides and nucleic acids may include those that function through chemical interactions that may include, but are not limited to, rapamycin-inducible dimerization of FRB-FKBP; Biotin-streptavidin; SNAP tag; Halo tag; CLIP tag; DmrA-DmrC heterodimer induced by a compound; bifunctional ligand (e.g., chemically induced dimerization).

[0167] As described herein, a “peptide tag” may be employed to recruit one or more polypeptides. A peptide tag may be any polypeptide that is capable of being bound by a corresponding motif such as an affinity polypeptide. A peptide tag may also be referred to as an “epitope” and when provided in multiple copies, a “multimerized epitope.” Example peptide tags can include, but are not limited to, a GCN4 peptide tag (e.g., Sun-Tag), a c-Myc affinity tag, an HA affinity tag, a His affinity tag, an S affinity tag, a methionine-His affinity tag, an RGD-His affinity tag, a FLAG octapeptide, a strep tag or strep tag II, a V5 tag, and/or a VSV-G epitope. In some embodiments, a peptide tag may also include phosphorylated tyrosines in specific sequence contexts recognized by SH2 domains, characteristic consensus sequences containing phosphoserines recognized by 14-3-3 proteins, proline rich peptide motifs recognized by SH3 domains, PDZ protein interaction domains or the PDZ signal sequences, and an AGO hook motif from plants. Peptide tags are disclosed in WO2018/136783 and U.S. Patent Application Publication No. 2017/0219596, which are incorporated by reference for their disclosures of peptide tags. Peptide tags that may be useful with this invention can include, but are not limited to, SEQ ID NO:201 and SEQ ID NO:202. An affinity polypeptide useful with peptide tags includes, but is not limited to, SEQ ID NO:203.

[0168] A peptide tag may comprise or be present in one copy or in 2 or more copies of the peptide tag (e.g., multimerized peptide tag or multimerized epitope) (e.g., about 2, 3, 4, 5, 6, 7, 8, 9, 10, 11, 12, 13, 14, 15, 16, 17, 18, 9, 20, 21, 22, 23, 24, or 25 or more peptide tags). When multimerized, the peptide tags may be fused directly to one another or they may be linked to one another via one or more amino acids (e.g., 1, 2, 3, 4, 5, 6, 7, 8, 9, 10, 11, 12, 13, 14, 15, 16, 17, 18, 19, 20 or more amino acids, optionally about 3 to about 10, about 4 to about 10, about 5 to about 10, about 5 to about 15, or about 5 to about 20 amino acids, and the like, and any value or range therein. Thus, in some embodiments, a CRISPR-Cas effector protein and/or polypeptide of the invention may be fused to one peptide tag or to two or more peptide tags, optionally wherein the two or more peptide tags are fused to one another via one or more amino acid residues. In some embodiments, a peptide tag useful with the invention may be a single copy of a GCN4 peptide tag or epitope or may be a multimerized GCN4 epitope comprising about 2 to about 25 or more copies of the peptide tag (e.g., about 2, 3, 4, 5, 6, 7, 8, 9, 10, 11, 12, 13, 14, 15, 16, 17, 18, 19, 20, 21, 22, 23, 24, 25 or more copies of a GCN4 epitope or any range therein).

[0169] In some embodiments, a peptide tag may be fused to a CRISPR-Cas polypeptide or domain. In some embodiments, a peptide tag may be fused or linked to the C-terminus of a CRISPR-Cas effector protein to form a CRISPR-Cas fusion protein. In some embodiments, a peptide tag may be fused or linked to the N-terminus of a CRISPR-Cas effector protein to form a CRISPR-Cas fusion protein. In some embodiments, a peptide tag may be fused within a CRISPR-Cas effector protein (e.g., a peptide tag may be in a loop region of a CRISPR-Cas effector protein). In some embodiments, peptide tag may be fused to or a fusion protein of the present invention.

[0170] An “affinity polypeptide” (e.g., “recruiting polypeptide”) refers to any polypeptide that is capable of binding to its corresponding peptide tag, peptide tag, or RNA recruiting motif. An affinity polypeptide for a peptide tag may be, for example, an antibody and/or a single chain antibody that specifically binds the peptide tag, respectively. In some embodiments, an antibody for a peptide tag may be, but is not limited to, a scFv antibody. In some embodiments, an affinity polypeptide may be fused or linked to the N-terminus of a fusion protein of the present invention. In some embodiments, the affinity polypeptide is stable under the reducing conditions of a cell or cellular extract.

[0171] The nucleic acid constructs of the invention and/or guide nucleic acids may be comprised in one or more expression cassettes as described herein. In some embodiments, a nucleic acid construct of the invention may be comprised in the same or in a separate expression cassette or vector from that comprising a guide nucleic acid and/or an extended guide nucleic acid.

[0172] In some embodiments, a nucleic acid construct, expression cassette, or vector of the invention that is optimized for expression in an organism (e.g., a human or plant) may be about 70% to 100% identical (e.g., about 70%, 71%, 72%, 73%, 74%, 75%, 76%, 77%, 78%, 79%, 80%, 81%, 82%, 83%, 84%, 85%, 86%, 87%, 88%, 89%, 90%, 91%, 92%, 93%, 94%, 95%, 96%, 97%, 98%, 99%, 99.5% or 100%) to a nucleic acid construct, expression cassette or vector comprising the same polynucleotide(s) but which have not been codon optimized for expression in the organism.

[0173] When used in combination with a guide nucleic acid, a nucleic acid construct of the invention (and expression cassette and/or vector comprising the same) may be used to modify a target nucleic acid and/or its expression. A target nucleic acid may be contacted with a nucleic acid construct of the invention and/or expression cassettes and/or vectors comprising the same prior to, concurrently with or after contacting the target nucleic acid with the guide nucleic acid/recruiting guide nucleic acid (and/or expression cassettes and vectors comprising the same.

[0174] According to embodiments of the present invention, provided herein are fusion proteins. A fusion protein of the present invention comprises a CRISPR-Cas effector protein and a polypeptide that has at least about 70%, 75%, 80%, 85%, 90%, 95%, 96%, 97%, 98%, 99%, or 100% sequence identity to one or more of SEQ ID NOs:241-242. Thus, a fusion protein of the present invention comprises a CRISPR-Cas effector protein that is fused (directly or indirectly) to a polypeptide that has at least about 70%, 75%, 80%, 85%, 90%, 95%, 96%, 97%, 98%, 99%, or 100% sequence identity to one or more of SEQ ID NOs:241-242. The polypeptide having a sequence that has at least about 70%, 75%, 80%, 85%, 90%, 95%, 96%, 97%, 98%, 99%, or 100% sequence identity to one or more of SEQ ID NOs:241-242 may be heterologous to a CRISPR-Cas effector protein. A fusion protein of the present invention may comprise two or more (e.g., 2, 3, 4, 5, or more) polypeptides that are the same or different and that each have a sequence that has at least about 70%, 75%, 80%, 85%, 90%, 95%, 96%, 97%, 98%, 99%, or 100% sequence identity to one or more of SEQ ID NOs:241-242, and optionally the two or more polypeptides may be fused (directly or indirectly) in tandem. In some embodiments, a fusion protein of the present invention comprises two or more (e.g., 2, 3, 4, 5, or more) polypeptides that each has a sequence that is at least about 70%, 75%, 80%, 85%, 90%, 95%, 96%, 97%, 98%, 99%, or 100% sequence identity to SEQ ID NO:241 or SEQ ID NO:242, and optionally the two or more polypeptides may be fused (directly or indirectly) in tandem.

[0175] In some embodiments, a fusion protein of the present invention comprises a polypeptide that has at least about 70%, 75%, 80%, 85%, 90%, 95%, 96%, 97%, 98%, 99%, or 100% sequence identity to SEQ ID NO:241 or SEQ ID NO:242 and the polypeptide has a length of about 10 to about 40 amino acid residues, e.g., the polypeptide may have a length of 10, 11, 12, 13, 14, or 15 amino acid residues to 16, 17, 18, 19, 20, 21, 22, 23, 24, 25, 26, 27, 28, 29, 30, 31, 32, 33, 34, 35, 36, 37, 38, 39, or 40 amino acid residues, or any value or range therebetween. In some embodiments, a fusion protein of the present invention comprises a polypeptide that has at least about 70%, 75%, 80%, 85%, 90%, 95%, 96%, 97%, 98%, 99%, or 100% sequence identity to SEQ ID NO:241 or SEQ ID NO:242 and the polypeptide has a length of 10, 11, 12, 13, 14, 15, 16, 17, 18, 19, 20, 21, 22, 23, 24, 25, 26, 27, 28, 29, 30, 31, 32, 33, 34, 35, 36, 37, 38, 39, or 40 amino acid residues. In some embodiments, a fusion protein of the present invention comprises a polypeptide that has at least about 70%, 75%, 80%, 85%, 90%, 95%, 96%, 97%, 98%, 99%, or 100% sequence identity to SEQ ID NO:241 and the polypeptide has a length of 10, 11, 12, 13, 14, 15, 16, 17, 18, 19, 20, 21, 22, 23, 24, 25, 26, 27, 28, 29, or 30 amino acid residues. In some embodiments, a fusion protein of the present invention comprises a polypeptide that has at least about 70%, 75%, 80%, 85%, 90%, 95%, 96%, 97%, 98%, 99%, or 100% sequence identity to SEQ ID NO:241 and the polypeptide has a length of 17, 18, 19, 20, 21, 22, 23, 24, or 25 amino acid residues. In some embodiments, a fusion protein of the present invention comprises a polypeptide that has at least about 70%, 75%, 80%, 85%, 90%, 95%, 96%, 97%, 98%, 99%, or 100% sequence identity to SEQ ID NO:242 and the polypeptide has a length of 20, 21, 22, 23, 24, 25, 26, 27, 28, 29, 30, 31, 32, 33, 34, 35, 36, 37, 38, 39, or 40 amino acid residues. In some embodiments, a fusion protein of the present invention comprises a polypeptide that has at least about 70%, 75%, 80%, 85%, 90%, 95%, 96%, 97%, 98%, 99%, or 100% sequence identity to SEQ ID NO:242 and the polypeptide has a length of 28, 29, 30, 31, 32, 33, 34, 35, 36, 37, 38, 39, or 40 amino acid residues.

[0176] A fusion protein of the present invention may comprise a polypeptide that has at least about 70%, 75%, 80%, 85%, 90%, 95%, 96%, 97%, 98%, 99%, or 100% sequence identity to SEQ ID NO:241 and an arginine or lysine at amino acid residue 9 of the polypeptide (e.g., R9 or K9). In some embodiments, a fusion protein of the present invention comprises a polypeptide that has at least about 70%, 75%, 80%, 85%, 90%, 95%, 96%, 97%, 98%, 99%, or 100% sequence identity to SEQ ID NO:241 and an arginine at amino acid residue 9 (R9) of the polypeptide. In some embodiments, a fusion protein of the present invention comprises a polypeptide that has at least about 70%, 75%, 80%, 85%, 90%, 95%, 96%, 97%, 98%, 99%, or 100% sequence identity to SEQ ID NO:241, an arginine at amino acid residue 9 (R9) of the polypeptide, and the polypeptide has a length of 17, 18, 19, 20, 21, 22, 23, 24, or 25 amino acid residues.

[0177] A fusion protein of the present invention may comprise a polypeptide that has at least about 70%, 75%, 80%, 85%, 90%, 95%, 96%, 97%, 98%, 99%, or 100% sequence identity to SEQ ID NO:242 and an arginine or lysine at one or more of amino acid residue(s) 9, 13, and/or 19 of the polypeptide (e.g., R9 or K9, R13 or K13, and/or R19 or K19). In some embodiments, a fusion protein of the present invention comprises a polypeptide that has at least about 70%, 75%, 80%, 85%, 90%, 95%, 96%, 97%, 98%, 99%, or 100% sequence identity to SEQ ID NO:242 and an arginine at amino acid residue 9 (R9), an arginine at amino acid residue 13 (R13), and an arginine at amino acid residue 19 (R19) of the polypeptide. In some embodiments, a fusion protein of the present invention comprises a polypeptide that has at least about 70%, 75%, 80%, 85%, 90%, 95%, 96%, 97%, 98%, 99%, or 100% sequence identity to SEQ ID NO:242; an arginine at amino acid residue 9 (R9), an arginine at amino acid residue 13 (R13), and an arginine at amino acid residue 19 (R19) of the polypeptide; and the polypeptide has a length of 28, 29, 30, 31, 32, 33, 34, 35, 36, 37, 38, 39, or 40 amino acid residues.

[0178] In some embodiments, the CRISPR-Cas effector protein and the polypeptide are directly fused (e.g., linked via a peptide bond) together without an intervening element between the CRISPR-Cas effector protein and the polypeptide. In some embodiments, a linker (e.g., a peptide linker) fuses/joins the CRISPR-Cas effector protein and the polypeptide. The linker may be a peptide linker that has a length of 1, 5, 10, or 15 amino acid residue(s) to 20, 25, 30, 35, 45, or 50 amino acid residues. In some embodiments, a fusion protein of the present invention comprises a peptide linker that has a length of 1, 2, 3, 4, 5, 6, 7, 8, 9, 10, 11, 12, 13, 14, 15, 16, 17, 18, 19, 20, 21, 22, 23, 24, 25 26, 27, 28, 29, 30, 31, 32, 33, 34, 35, 36, 37, 38, 39, 40, 41, 42, 43, 44, 45, 46, 47, 48, 49, or 50 amino acid residue(s). A fusion protein of the present invention may comprise one or more linker(s) (e.g., 1, 2, 3, 4, or more) (e.g., one or more peptide linker(s)). In some embodiments, a fusion protein of the present invention comprises two linkers (e.g., two peptide linkers). In some embodiments, a fusion protein of the present invention comprises a peptide linker that comprises glycine and/or serine. In some embodiments, a fusion protein of the present invention comprises a peptide linker that has an amino acid sequence of one of SEQ ID NOs:1-36 or a sequence selected from: CA, CF, (GGS)ₙ, GS, SG, wherein n is an integer of 1-20 (e.g., 1, 2, 3, 4, 5, 6, 7, 8, 9, 10, 11, 12, 13, 14, 15, 16, 17, 18, 19, or 20).

[0179] In some embodiments, a fusion protein of the present invention may comprise a polypeptide that has at least about 70%, 75%, 80%, 85%, 90%, 95%, 96%, 97%, 98%, 99%, or 100% sequence identity to one or more of SEQ ID NOs:241-242 that is fused (directly or indirectly) to the N- and/or C-terminus of a CRISPR-Cas effector protein. In some embodiments, the polypeptide is fused to the N-terminus of the CRISPR-Cas effector protein. In some embodiments, the polypeptide is fused to the C-terminus of the CRISPR-Cas effector protein.

[0180] A fusion protein of the present invention may comprise a CRISPR-Cas effector protein having a sequence that has at least about 70%, 75%, 80%, 85%, 90%, 95%, 96%, 97%, 98%, 99%, or 100% sequence identity to one or more of SEQ ID NOs:39-65, 70-72, 88-189, 280-287, and 299-301. In some embodiments, the CRISPR-Cas effector protein has a sequence of one of SEQ ID NOs:39-65, 70-72, 88-189, 280-287, or 299-301. In some embodiments, a fusion protein of the present invention comprises one or more (e.g., 1, 2, 3, or more) polypeptide(s) that have a sequence having at least about 70%, 75%, 80%, 85%, 90%, 95%, 96%, 97%, 98%, 99%, or 100% sequence identity to one or more of SEQ ID NOs:241-242. In some embodiments, a fusion protein of the present invention comprises two or more polypeptides that have a sequence of at least about 70% sequence identity to one or more of SEQ ID NOs:241-242 and/or two or more copies of a polypeptide that has a sequence of at least about 70% sequence identity to one or more of SEQ ID NOs:241-242. In some embodiments, a fusion protein of the present invention comprises a CRISPR-Cas effector protein having a sequence that has at least about 70%, 75%, 80%, 85%, 90%, 95%, 96%, 97%, 98%, 99%, or 100% sequence identity to one or more of SEQ ID NOs:39-65, 70-72, 88-189, 280-287, and 299-301 that is fused (directly or indirectly) to a polypeptide that has a sequence having at least about 70%, 75%, 80%, 85%, 90%, 95%, 96%, 97%, 98%, 99%, or 100% sequence identity to one or more of SEQ ID NOs:241-242. In some embodiments, a fusion protein of the present invention comprises a CRISPR-Cas effector protein that is fused to a polypeptide having a sequence of one of SEQ ID NOs:241-242.

[0181] A fusion protein of the present invention may comprise a polypeptide of interest that is fused (directly or indirectly) to the N- or C-terminus of a CRISPR-Cas effector protein of the fusion protein. In some embodiments, a fusion protein of the present invention comprises two or more (e.g., 2, 3, 4, or more) polypeptides of interest that are the same or different from each other. In some embodiments, a fusion protein of the present invention comprises a deaminase (e.g., an adenosine deaminase and/or a cytidine deaminase). Two or more (e.g., 2, 3, 4 or more) deaminases that are the same or different may be present in a fusion protein of the present invention. A deaminase may be fused (directly or indirectly) to the N- or C-terminus of a CRISPR-Cas effector protein of a fusion protein of the present invention. In some embodiments, a fusion protein of the present invention comprises an adenosine deaminase and a cytidine deaminase. In some embodiments, a fusion protein of the present invention is fused to a cytosine deaminase (e.g., all or a portion of a cytosine deaminase having at least 70%, 75%, 80%, 85%, 90%, 95%, 96%, 97%, 98%, 99%, or 100% sequence identity to one of SEQ ID NOs:204-213 optionally wherein the cytosine deaminase is fused (directly or indirectly) to the N- or C-terminus of a CRISPR-Cas effector protein of the fusion protein. In some embodiments, a fusion protein of the present invention is fused to a glycosylase inhibitor, optionally wherein the glycosylase inhibitor is a uracil glycosylase inhibitor (UGI), e.g., all or a portion of a UGI having at least 70%, 75%, 80%, 85%, 90%, 95%, 96%, 97%, 98%, 99%, or 100% sequence identity to SEQ ID NO:214. In some embodiments, a fusion protein of the present invention is fused (directly or indirectly) to a cytosine deaminase and a glycosylase inhibitor in any order. In some embodiments, a fusion protein of the present invention is fused to an adenine deaminase (e.g., all or a portion of an adenine deaminase having at least 70%, 75%, 80%, 85%, 90%, 95%, 96%, 97%, 98%, 99%, or 100% sequence identity to one of SEQ ID NOs:215-225), optionally wherein the adenine deaminase is fused (directly or indirectly) to the N- or C-terminus of a CRISPR-Cas effector protein of the fusion protein. In some embodiments, a fusion protein of the present invention is fused (directly or indirectly) to an adenine deaminase and a cytosine deaminase in any order, optionally wherein the adenine deaminase is fused (directly or indirectly) to one of the N- or C-terminus of a CRISPR-Cas effector protein of the fusion protein and the cytosine deaminase is fused (directly or indirectly) to the other of the N- or C-terminus of the CRISPR-Cas effector protein. In some embodiments, a fusion protein of the present invention comprises a reverse transcriptase, optionally wherein the reverse transcriptase is fused (directly or indirectly) to the N- or C-terminus of a CRISPR-Cas effector protein of the fusion protein. In some embodiments, a fusion protein of the present invention is fused to a nuclear localization signal (NLS). A fusion protein of the present invention may comprise one or more (e.g., 1, 2, 3, or more) nuclear localization signal(s). In some embodiments, a nuclear localization signal has at least 70%, 75%, 80%, 85%, 90%, 95%, 96%, 97%, 98%, 99%, or 100% sequence identity to one or more of SEQ ID NOs:226-228. In some embodiments, a fusion protein of the present invention comprises a NLS that is fused (directly or indirectly) to the N- or C-terminus of a CRISPR-Cas effector protein of the fusion protein. In some embodiments, a NLS is present at the N-terminus and/or C-terminus of a fusion protein of the present invention.

[0182] Exemplary fusion proteins according to some embodiments of the present invention are shown in FIG. 1A and FIG. 1B. As shown in FIG. 1A, a NLS may be present at both the N-terminus and C-terminus of a fusion protein of the present invention, a deaminase (e.g., an adenosine deaminse) may be fused via a linker (e.g., a peptide linker) to the N-terminus of a CRISPR-Cas effector protein, and a polypeptide having a sequence that has at least about 70%, 75%, 80%, 85%, 90%, 95%, 96%, 97%, 98%, 99%, or 100% sequence identity to one or more of SEQ ID NOs:241-242 may be fused via a linker (e.g., a peptide linker) to the C-terminus of a CRISPR-Cas effector protein. As shown in FIG. 1B, a fusion protein of the present invention may comprise two deaminases. In some embodiments, a fusion protein of the present invention comprises: an adenosine deaminase, a CRISPR-Cas effector protein, and a polypeptide that has at least about 70%, 75%, 80%, 85%, 90%, 95%, 96%, 97%, 98%, 99%, or 100% sequence identity to one or more of SEQ ID NOs:241-242, optionally wherein the adenosine deaminase is fused (directly or indirectly) to the N-terminus of the CRISPR-Cas effector protein and/or wherein the polypeptide is fused (directly or indirectly) to the C-terminus of the CRISPR-Cas effector protein. In some embodiments, a fusion protein of the present invention comprises, from the N-terminus to the C-terminus: a polypeptide of interest (e.g., an adenosine deaminase, a cytosine deaminase, and/or a reverse transcriptase), a CRISPR-Cas effector protein (e.g., a CRISPR-Cas effector protein having a sequence that has at least 70%, 75%, 80%, 85%, 90%, 95%, 96%, 97%, 98%, 99%, or 100% sequence identity to one of SEQ ID NOs:39-65, 70-72, 88-189, 280-287, or 299-301), and a polypeptide that has at least about 70%, 75%, 80%, 85%, 90%, 95%, 96%, 97%, 98%, 99%, or 100% sequence identity to one of SEQ ID NOs:241-242.

[0183] In some embodiments, a fusion protein of the present invention has an amino acid sequence comprising at least 70%, 75%, 80%, 85%, 90%, 95%, 96%, 97%, 98%, 99%, or 100% sequence identity to one or more of SEQ ID NOs:243-256, 288-292, and/or 308. In some embodiments, a fusion protein of the present invention has an amino acid sequence of one of SEQ ID NOs:243-256, 288-292, or 308. In some embodiments, a polynucleotide of the present invention has a sequence comprising at least 70%, 75%, 80%, 85%, 90%, 95%, 96%, 97%, 98%, 99%, or 100% sequence identity to one or more of SEQ ID NOs:266-279, 294-298, and/or 307. In some embodiments, a polynucleotide of the present invention having a sequence of one of SEQ ID NO:266-279, 294-298, or 307 encodes the fusion protein of SEQ ID NOs:243-256, 288-292, or 308, respectively.

[0184] A fusion protein of the present invention may have at least one improvement (e.g., modified editing window, increased nuclease activity, increased stability, increased binding to a nucleic acid, etc.) compared to a CRISPR-Cas effector protein that is devoid of a polypeptide that has at least about 70%, 75%, 80%, 85%, 90%, 95%, 96%, 97%, 98%, 99%, or 100% sequence identity to one or more of SEQ ID NOs:241-242. In some embodiments, a fusion protein of the present invention has at least one improvement (e.g., increased activity and/or binding) compared to a protein having an amino acid sequence of any one of SEQ ID NOs:39-65, 70-72, 88-189, 280-287, or 299-301. In some embodiments, a fusion protein of the present invention may increase stability of and/or stabilize the fusion protein at or in proximity to a target nucleic acid (e.g., compared to the stability of a protein or complex devoid of a polypeptide that has at least about 70%, 75%, 80%, 85%, 90%, 95%, 96%, 97%, 98%, 99%, or 100% sequence identity to one or more of SEQ ID NOs:241-242 and/or compared to a protein having an amino acid sequence of any one of SEQ ID NOs:39-65, 70-72, 88-189, 280-287, or 299-301). In some embodiments, increased stability may be determined by increased editing compared to a control and/or by editing efficiency (EE) and/or an editing strength.

[0185] Any deaminase domain/polypeptide useful for base editing may be used with this invention. A “cytosine deaminase” and “cytidine deaminase” as used herein refer to a polypeptide or domain thereof that catalyzes or is capable of catalyzing cytosine deamination in that the polypeptide or domain catalyzes or is capable of catalyzing the removal of an amine group from a cytosine base. Thus, a cytosine deaminase may result in conversion of cytosine to a thymidine (through a uracil intermediate), causing a C to T conversion, or a G to A conversion in the complementary strand in the genome. Thus, in some embodiments, the cytosine deaminase encoded by the polynucleotide of the invention generates a C→T conversion in the sense (e.g., “±”; template) strand of the target nucleic acid or a G→A conversion in antisense (e.g., “−”, complementary) strand of the target nucleic acid. In some embodiments, a cytosine deaminase encoded by a polynucleotide of the invention generates a C to T, G, or A conversion in the complementary strand in the genome.

[0186] A cytosine deaminase useful with this invention may be any known or later identified cytosine deaminase from any organism (see, e.g., U.S. Pat. No. 10,167,457 and Thuronyi et al. Nat. Biotechnol. 37:1070-1079 (2019), each of which is incorporated by reference herein for its disclosure of cytosine deaminases). Cytosine deaminases can catalyze the hydrolytic deamination of cytidine or deoxycytidine to uridine or deoxyuridine, respectively. Thus, in some embodiments, a deaminase or deaminase domain useful with this invention may be a cytidine deaminase domain, catalyzing the hydrolytic deamination of cytosine to uracil. In some embodiments, a cytosine deaminase may be a variant of a naturally-occurring cytosine deaminase, including, but not limited to, a primate (e.g., a human, monkey, chimpanzee, gorilla), a dog, a cow, a rat or a mouse. Thus, in some embodiments, an cytosine deaminase useful with the invention may be about 70% to about 100% identical to a wild-type cytosine deaminase (e.g., about 70%, 71%, 72%, 73%, 74%, 75%, 76%, 77%, 78%, 79%, 80%, 81%, 82%, 83%, 84%, 85%, 86%, 87%, 88%, 89%, 90%, 91%, 92%, 93%, 94%, 95%, 96%, 97%, 98%, 99%, or 100% identical, and any range or value therein, to a naturally occurring cytosine deaminase).

[0187] In some embodiments, a cytosine deaminase useful with the invention may be an apolipoprotein B mRNA-editing complex (APOBEC) family deaminase. In some embodiments, the cytosine deaminase may be an APOBEC1 deaminase, an APOBEC2 deaminase, an APOBEC3A deaminase, an APOBEC3B deaminase, an APOBEC3C deaminase, an APOBEC3D deaminase, an APOBEC3F deaminase, an APOBEC3G deaminase, an APOBEC3H deaminase, an APOBEC4 deaminase, a human activation induced deaminase (hAID), an rAPOBEC1, FERNY, and/or a CDA1, optionally a pmCDA1, an atCDA1 (e.g., At2g19570), and evolved versions of the same. Evolved deaminases are disclosed in, for example, U.S. Pat. No. 10,113,163, Gaudelli et al. Nature 551 (7681): 464-471 (2017)) and Thuronyi et al. (Nature Biotechnology 37:1070-1079 (2019)), each of which are incorporated by reference herein for their disclosure of deaminases and evolved deaminases. In some embodiments, the cytosine deaminase may be an APOBEC1 deaminase having the amino acid sequence of SEQ ID NO:204. In some embodiments, the cytosine deaminase may be an APOBEC3A deaminase having the amino acid sequence of SEQ ID NO:205. In some embodiments, the cytosine deaminase may be an CDA1 deaminase, optionally a CDA1 having the nucleotide sequence of SEQ ID NO:206. In some embodiments, the cytosine deaminase may be a FERNY deaminase, optionally a FERNY having the amino acid sequence of SEQ ID NO:209. In some embodiments, the cytosine deaminase may be a rAPOBEC1 deaminase, optionally a rAPOBEC1 deaminase having the amino acid sequence of SEQ ID NO:210. In some embodiments, the cytosine deaminase may be a hAID deaminase, optionally a hAID having the amino acid sequence of SEQ ID NO:208 or SEQ ID NO:211. In some embodiments, a cytosine deaminase useful with the invention may be about 70% to about 100% identical (e.g., 70%, 71%, 72%, 73%, 74%, 75%, 76%, 77%, 78%, 79%, 80%, 81%, 82%, 83%, 84%, 85%, 86%, 87%, 88%, 89%, 90%, 91%, 92%, 93%, 94%, 95%, 96%, 97%, 98%, 99%, 99.5% or 100% identical) to the amino acid sequence of a naturally occurring cytosine deaminase (e.g., “evolved deaminases”) (see, e.g., SEQ ID NO:212, SEQ ID NO:213, SEQ ID NO:214). In some embodiments, a cytosine deaminase useful with the invention may be about 70% to about 99.5% identical (e.g., about 70%, 71%, 72%, 73%, 74%, 75%, 76%, 77%, 78%, 79%, 80%, 81%, 82%, 83%, 84%, 85%, 86%, 87%, 88%, 89%, 90%, 91%, 92%, 93%, 94%, 95%, 96%, 97%, 98%, 99%, or 99.5% identical) to the amino acid sequence of any one of SEQ ID NOs:204-213 (e.g., at least 80%, at least 85%, at least 90%, at least 92%, at least 95%, at least 96%, at least 97%, at least 98%, at least 99%, or at least 99.5% identical to the amino acid sequence of any one of SEQ ID NOs:204-213). In some embodiments, a polynucleotide encoding a cytosine deaminase may be codon optimized for expression in a plant and the codon optimized polypeptide may be about 70% to 99.5% identical to the reference polynucleotide.

[0188] An “adenine deaminase” and “adenosine deaminase” as used herein refer to a polypeptide or domain thereof that catalyzes or is capable of catalyzing the hydrolytic deamination (e.g., removal of an amine group from adenine) of adenine or adenosine. In some embodiments, an adenine deaminase may catalyze the hydrolytic deamination of adenosine or deoxyadenosine to inosine or deoxyinosine, respectively. In some embodiments, the adenosine deaminase may catalyze the hydrolytic deamination of adenine or adenosine in DNA. In some embodiments, an adenine deaminase encoded by a nucleic acid construct of the invention may generate an A→G conversion in the sense (e.g., “+”; template) strand of the target nucleic acid or a T→C conversion in the antisense (e.g., “−”, complementary) strand of the target nucleic acid. An adenine deaminase useful with this invention may be any known or later identified adenine deaminase from any organism (see, e.g., U.S. Pat. No. 10,113,163, which is incorporated by reference herein for its disclosure of adenine deaminases).

[0189] In some embodiments, an adenosine deaminase may be a variant of a naturally-occurring adenine deaminase. Thus, in some embodiments, an adenosine deaminase may be about 70% to 100% identical to a wild-type adenine deaminase (e.g., about 70%, 71%, 72%, 73%, 74%, 75%, 76%, 77%, 78%, 79%, 80%, 81%, 82%, 83%, 84%, 85%, 86%, 87%, 88%, 89%, 90%, 91%, 92%, 93%, 94%, 95%, 96%, 97%, 98%, 99%, or 100% identical, and any range or value therein, to a naturally occurring adenine deaminase). In some embodiments, the deaminase or deaminase does not occur in nature and may be referred to as an engineered, mutated or evolved adenosine deaminase. Thus, for example, an engineered, mutated or evolved adenine deaminase polypeptide or an adenine deaminase domain may be about 70% to 99.9% identical to a naturally occurring adenine deaminase polypeptide/domain (e.g., about 70%, 71%, 72%, 73%, 74%, 75%, 76%, 77%, 78%, 79%, 80%, 81%, 82%, 83%, 84%, 85%, 86%, 87%, 88%, 89%, 90%, 91%, 92%, 93%, 94%, 95%, 96%, 97%, 98%, 99%, 99.1%, 99.2%, 99.3%, 99.4%, 99.5%, 99.6%, 99.7%, 99.8% or 99.9% identical, and any range or value therein, to a naturally occurring adenine deaminase polypeptide or adenine deaminase domain). In some embodiments, the adenosine deaminase may be from a bacterium, (e.g., Escherichia coli, Staphylococcus aureus, Haemophilus influenzae, Caulobacter crescentus, and the like). In some embodiments, a polynucleotide encoding an adenine deaminase polypeptide/domain may be codon optimized for expression in a plant.

[0190] In some embodiments, an adenine deaminase domain may be a wild-type tRNA-specific adenosine deaminase domain, e.g., a tRNA-specific adenosine deaminase (TadA) and/or a mutated/evolved adenosine deaminase domain, e.g., mutated/evolved tRNA-specific adenosine deaminase domain (TadA*). In some embodiments, a TadA domain may be from E. coli. In some embodiments, the TadA may be modified, e.g., truncated, missing one or more N-terminal and/or C-terminal amino acids relative to a full-length TadA (e.g., 1, 2, 3, 4, 5, 6, 7, 8, 9, 10, 11, 12, 13, 14, 15, 6, 17, 18, 19, or 20 N-terminal and/or C terminal amino acid residues may be missing relative to a full length TadA). In some embodiments, a TadA polypeptide or TadA domain does not comprise an N-terminal methionine. In some embodiments, a wild-type E. coli TadA comprises the amino acid sequence of SEQ ID NO:215. In some embodiments, a mutated/evolved E. coli TadA* comprises the amino acid sequence of any one of SEQ ID NOs:216-219. In some embodiments, a polynucleotide encoding a TadA/TadA* may be codon optimized for expression in a plant. In some embodiments, an adenine deaminase may comprise all or a portion of an amino acid sequence of any one of SEQ ID NOs:215-225. In some embodiments, an adenine deaminase may comprise all or a portion of an amino acid sequence of any one of SEQ ID NOs:215-225.

[0191] In some embodiments, a nucleic acid construct of this invention may further encode a glycosylase inhibitor (e.g., an uracil glycosylase inhibitor (UGI) such as uracil-DNA glycosylase inhibitor). In some embodiments, the invention provides fusion proteins comprising an engineered protein and a UGI and/or one or more polynucleotides encoding the same, optionally wherein the one or more polynucleotides may be codon optimized for expression in a plant.

[0192] A “uracil glycosylase inhibitor” useful with the invention may be any protein or polypeptide that is capable of inhibiting an uracil-DNA glycosylase base-excision repair enzyme. In some embodiments, an UGI domain comprises a wild-type UGI or a fragment thereof. In some embodiments, an UGI domain useful with the invention may be about 70% to about 100% identical (e.g., 70%, 71%, 72%, 73%, 74%, 75%, 76%, 77%, 78%, 79%, 80%, 81%, 82%, 83%, 84%, 85%, 86%, 87%, 88%, 89%, 90%, 91%, 92%, 93%, 94%, 95%, 96%, 97%, 98%, 99%, 99.5% or 100% identical and any range or value therein) to the amino acid sequence of a naturally occurring UGI domain. In some embodiments, an UGI domain may comprise the amino acid sequence of SEQ ID NO:214 or a polypeptide having about 70% to about 99.5% identity to the amino acid sequence of SEQ ID NO:214 (e.g., at least 80%, at least 85%, at least 90%, at least 92%, at least 95%, at least 96%, at least 97%, at least 98%, at least 99%, or at least 99.5% identical to the amino acid sequence of SEQ ID NO:214). For example, in some embodiments, an UGI domain may comprise a fragment of the amino acid sequence of SEQ ID NO:214 that is 100% identical to a portion of consecutive nucleotides (e.g., 10, 15, 20, 25, 30, 35, 40, 45, 50, 55, 60, 65, 70, 75, 80 consecutive nucleotides; e.g., about 10, 15, 20, 25, 30, 35, 40, 45 to about 50, 55, 60, 65, 70, 75, 80 consecutive nucleotides) of the amino acid sequence of SEQ ID NO:214. In some embodiments, an UGI domain may be a variant of a known UGI (e.g., SEQ ID NO:214) having about 70% to about 99.5% identity (e.g., 70%, 71%, 72%, 73%, 74%, 75%, 76%, 77%, 78%, 79%, 80%, 81%, 82%, 83%, 84%, 85%, 86%, 87%, 88%, 89%, 90%, 91%, 92%, 93%, 94%, 95%, 96%, 97%, 98%, 99%, 99.5% identity, and any range or value therein) to the known UGI. In some embodiments, a polynucleotide encoding an UGI may be codon optimized for expression in a plant (e.g., a plant) and the codon optimized polypeptide may be about 70% to about 99.5% identical to the reference polynucleotide.

[0193] A “reverse transcriptase” as used herein includes, but is not limited to, a naturally occurring reverse transcriptase, an engineered reverse transcriptase, or a commercially available reverse transcriptase. Exemplary reverse transcriptases include, but are not limited to, Moloney Murine Leukemia Virus Reverse Transcriptase (MMLV-RT or M-MuLV-RT), mutated MMLV (e.g., 5M-MMLV), Avian Myeloblastosis Virus Reverse Transcriptase (AMV-RT), Human Immunodeficiency Virus Reverse Transcriptase (HIV-RT). In some embodiments, a reverse transcriptase may be MMLV and/or 5M-MMLV. In some embodiments, a reverse transcriptase may have a sequence that has at least about 70%, 75%, 80%, 85%, 90%, 95%, 96%, 97%, 98%, 99%, or more sequence identity to one or more of SEQ ID NOs:229-240.

[0194] A nucleic acid molecule may encode a fusion protein of the present invention, which may be present in an expression cassette and/or vector. A polynucleotide and/or recombinant nucleic acid construct of this invention can be codon optimized for expression. In some embodiments, a polynucleotide, nucleic acid construct, expression cassette, and/or vector of the present invention (e.g., that comprises/encodes a fusion protein of the present invention), and/or a guide nucleic acid) may be codon optimized for expression in an organism (e.g., an animal, a plant, a fungus, an archacon, or a bacterium). In some embodiments, an expression cassette and/or vector of the present invention comprises a polynucleotide that encodes a polypeptide that has at least about 70%, 75%, 80%, 85%, 90%, 95%, 96%, 97%, 98%, 99%, or more sequence identity to one or more of SEQ ID NOs:241-242. In some embodiments, an expression cassette and/or vector of the present invention comprises a polynucleotide that encodes a polypeptide that has at least about 70%, 75%, 80%, 85%, 90%, 95%, 96%, 97%, 98%, 99%, or more sequence identity to one or more of SEQ ID NOs:243-256, 288-292, and/or 308. In some embodiments, an expression cassette and/or vector of the present invention comprises a polynucleotide that encodes a promoter sequence and a polynucleotide that encodes a fusion protein that comprises at least about 70%, 75%, 80%, 85%, 90%, 95%, 96%, 97%, 98%, 99%, or more sequence identity to one or more of SEQ ID NOs:241-256 and/or 288-292. In some embodiments, an expression cassette and/or vector of the present invention comprises a polynucleotide that has a sequence comprising at least 70%, 75%, 80%, 85%, 90%, 95%, 96%, 97%, 98%, 99%, or 100% sequence identity to one or more of SEQ ID NOs:266-279, 294-298, and/or 307. In some embodiments, an expression cassette and/or vector of the present invention comprises a first polynucleotide that encodes a promoter sequence and a second polynucleotide that has a sequence comprising at least 70%, 75%, 80%, 85%, 90%, 95%, 96%, 97%, 98%, 99%, or 100% sequence identity to one or more of SEQ ID NOs:266-279, 294-298, and/or 307. The polynucleotide encoding a fusion protein of the present invention may be codon-optimized for expression in a particular organism (e.g., a human or plant). In some embodiments, the organism is an animal (e.g., a human), a plant, a fungus, an archacon, or a bacterium.

[0195] Methods of modifying a target nucleic acid in a cell are provided, and may comprise introducing an expression cassette and/or vector of the present invention into the cell to provide a modified target nucleic acid. In some embodiments, the cell is a plant cell and the method further comprises regenerating the plant cell comprising the modified target nucleic acid to produce a plant comprising the modified target nucleic acid. In some embodiments, the introducing of the expression cassette is carried out at a temperature of about 20° C. to about 42° C. In some embodiments, the cell is a mammalian cell (e.g., a human cell).

[0196] Methods for producing a fusion protein of the present invention are provided herein and may comprise culturing a cell or a plurality of cells that have been transformed with a nucleic acid encoding a fusion protein of the present invention; and isolating the fusion protein of the present invention to thereby produce the fusion protein. In some embodiments, the step of isolating is performed by dialysis, centrifugation, column purification, and/or the like.

[0197] Methods for performing reverse transcription are provided herein and may comprise contacting a target nucleic acid with a fusion protein of the present invention. In some embodiments, all or a portion of the fusion protein has at least about 70%, 75%, 80%, 85%, 90%, 95%, 96%, 97%, 98%, 99%, or more sequence identity to one or more of SEQ ID NOs:241-256 and/or 288-292. A fusion protein of the present invention optionally together with one or more components may reverse transcribe the target nucleic acid to provide a DNA (e.g., a cDNA). In some embodiments, the target nucleic acid is in a plant and/or in a plant cell that includes a cell wall. In some embodiments, the target nucleic acid is in a mammal and/or is in a mammalian cell.

[0198] Methods of modifying a target nucleic acid are provided herein and may comprise contacting the target nucleic acid with a fusion protein of the present invention and a guide nucleic acid. In some embodiments, all or a portion of the fusion protein has at least about 70%, 75%, 80%, 85%, 90%, 95%, 96%, 97%, 98%, 99%, or more sequence identity to one or more of SEQ ID NOs:241-256 and/or 288-292. In some embodiments, the target nucleic acid is in a plant and/or in a plant cell that includes a cell wall. In some embodiments, the target nucleic acid is in a mammal and/or is in a mammalian cell. In some embodiments, the method of modifying the target nucleic acid is a templated editing method. In some embodiments, the method further comprises introducing a nucleic acid molecule encoding the fusion protein into the cell and producing the fusion protein in the cell.

[0199] A method of the present invention may comprise contacting the target nucleic acid with an extended guide nucleic acid. In some embodiments, the extended guide nucleic acid comprises a primer binding site and the target nucleic acid is double stranded and comprises a first strand and a second strand. In some embodiments, the primer binding site of the extended guide nucleic acid binds to the first strand or to the second strand of the target nucleic acid. In some embodiments, the second strand is the non-target strand of the target nucleic acid. In some embodiments, the target nucleic acid is double stranded and comprises a first strand and a second strand and the primer binding site binds to the first strand of the target nucleic acid. The first strand may be the target strand of the target nucleic acid and/or a fusion protein of the present invention may be recruited to the first strand. In some embodiments, the target nucleic acid is double stranded and comprises a first strand and a second strand and the primer binding site of the extended guide nucleic acid binds to the second strand of the target nucleic acid. In some embodiments, the second strand is the non-target strand of the target nucleic acid and/or the fusion protein is recruited to the second strand. In some embodiments, the fusion protein of the present invention is a double stranded nuclease that cuts the first strand and the second strand of the target nucleic acid resulting in a double stranded break. In some embodiments, the fusion protein and the extended guide nucleic acid form a complex or are comprised in a complex.

[0200] A method of the present invention may comprise contacting a target nucleic acid with and/or introducing into a cell an extended guide nucleic acid that comprises (i) a CRISPR nucleic acid and/or a CRISPR nucleic acid and a traer nucleic acid; and (ii) an extended portion comprising a primer binding site and a reverse transcriptase template (RT template). In some embodiments, the extended portion of the extended guide nucleic acid is fused to either the 5′ end or 3′ end of the CRISPR nucleic acid (e.g., 5′ to 3′: repeat-spacer-extended portion, or extended portion-repeat-spacer) and/or to the 5′ or 3′ end of the tracr nucleic acid. In some embodiments, the extended portion of the extended guide nucleic acid comprises, 5′ to 3′, an RT template and a primer binding site. In some embodiments, the extended portion of the extended guide nucleic acid is located 5′ of the crRNA.

[0201] In some embodiments, the primer binding site has a length of about one nucleotide to about 100 nucleotides. In some embodiments, the primer binding site is at least 45 nucleotides in length or about 45 nucleotides to about 100 nucleotides, e.g., 45, 46, 47, 48, 49, 50, 51, 52, 53, 54, 55, 56, 57, 58, 59, 60, 61, 62, 63, 64, 65, 66, 67, 68, 69, 70, 71, 72, 73, 74, 75, 76, 77, 78, 79, 80, 81, 82, 83, 84, 85, 86, 87, 88, 89, 90, 91, 92, 93, 94, 95, 96, 97, 98, 99, or 100 nucleotides in length.

[0202] In some embodiments, the RT template has a length of about one to about 100 nucleotides, or the RT template can have a length of about 40 nucleotides or less, e.g., 40, 39, 38, 37, 36, 35, 34, 33, 32, 31, 30, 29, 28, 27, 26, 25, 24, 23, 22, 21, 20, 19, 18, 17, 16, 15, 14, 13, 12, 11, 10, 9, 8, 7, 6, 5, 4, 3, 2, or 1 nucleotide.

[0203] In some embodiments, the extended portion of the extended guide nucleic acid is linked to the CRISPR nucleic acid and/or the tracrRNA via a linker. The linker may be about 1 to about 100 nucleotides in length, e.g., 1, 2, 3, 4, 5, 6, 7, 8, 9, 10, 11, 12, 13, 14, 15, 16, 17, 18, 19, 20, 21, 22, 23, 24, 25 26, 27, 28, 29, 30, 31, 32, 33, 34, 35, 36, 37, 38, 39, 40, 41, 42, 43, 44, 45, 46, 47, 48, 49, 50, 51, 52, 53, 54, 55, 56, 57, 58, 59, 60, 61, 62, 63, 64, 65, 66, 67, 68, 69, 70, 71, 72, 73, 74, 75, 76, 77, 78, 79, 80, 81, 82, 83, 84, 85, 86, 87, 88, 89, 90, 91, 92, 93, 94, 95, 96, 97, 98, 99, or 100 nucleotides in length.

[0204] In some embodiments, in a method of the present invention, a fusion protein of the present invention is fused to one or more components that recruit a deaminase and/or reverse transcriptase to the fusion protein. In some embodiments, a fusion protein of the present invention is fused, e.g. linked, to a peptide tag, for example, an epitope or a multimerized epitope, and a reverse transcriptase is fused, e.g., linked, to an affinity polypeptide that binds to the peptide tag. In some embodiments, a fusion protein of the present invention is fused, e.g., linked, to a peptide tag, for example, an epitope or a multimerized epitope, and a reverse transcriptase is fused (linked) to an affinity polypeptide that binds to the peptide tag. In some embodiments, the target nucleic acid is contacted with two or more reverse transcriptases.

[0205] In some embodiments, an extended guide nucleic acid is linked to an RNA recruiting motif, and a reverse transcriptase is fused, e.g., linked, to an affinity polypeptide that binds to the RNA recruiting motif. In some embodiments, the target nucleic acid is contacted with two or more reverse transcriptases. In some embodiments, the extended guide nucleic acid, e.g. extended guide RNA, is linked to two or more RNA recruiting motifs, optionally wherein the two or more RNA recruiting motifs are the same RNA recruiting motif or different RNA recruiting motifs. In some embodiments, at least one of the two or more RNA recruiting motifs is located on the 3′ end of the extended portion of the extended guide nucleic acid or is embedded in the extended portion.

[0206] In some embodiments, a method of the present invention has increased efficiency in modifying a target nucleic acid compared to the efficiency of a control method (e.g., a method that uses a control CRISPR-Cas effector protein (e.g., a CRISPR-Cas effector protein that is devoid of polypeptide that has at least about 70%, 75%, 80%, 85%, 90%, 95%, 96%, 97%, 98%, 99%, or 100% sequence identity to one or more of SEQ ID NOs:241-242 and/or a CRISPR-Cas effector protein that has an amino acid sequence of any one of SEQ ID NOs:39-65, 70-72, 88-189, 280-287, or 299-301) and is performed under the same conditions). A method of the present invention may generate increased indels and/or increased levels of modification (e.g., precise modifications) compared to a control method.

[0207] A fusion protein of the present invention may be present in a complex with a guide nucleic acid. The guide nucleic acid may be designed to function with the CRISPR-Cas effector protein that is present in the fusion protein. In some embodiments, a complex and/or method of the present invention may include a complex and/or method as described in U.S. Patent Application Publication No. 2021/0130835 and/or in U.S. Patent Application Publication No. 2022/0145334, the contents of each of which are incorporated herein by reference in their entirety, with a fusion protein of the present invention used in place of a CRISPR-Cas effector protein.

[0208] In some embodiments, an editing system of the present invention is used in prime editing. “Prime editing” and grammatical variants thereof as used herein refer to a nucleic acid editing technology that uses a Cas9 nickase domain fused to a reverse transcriptase and modifies a target nucleic acid without a double strand break or a donor DNA template. In Prime editing, the Cas9 nickase domain cuts the non-complementary strand of DNA upstream of the PAM site, thereby providing a 3′ flap that is extended with the extension including a modification. Further details on Prime editing can be found in Anzalone et al. (2019) Nature 576, 149-157 and/or U.S. Patent Application Publication No. 2021/0147862, the contents of each of which are incorporated herein by reference in their entirety.

[0209] In some embodiments, an editing system of the present invention utilizes the Redraw editing system. Further details on the Redraw editing system can be found in U.S. Patent Application Publication No. 2021/0130835 and/or in U.S. Patent Application Publication No. 2022/0145334, the contents of each of which are incorporated herein by reference in their entirety.

[0210] As described herein, polypeptides (e.g., fusion proteins), nucleic acids, expression cassettes, and/or vectors of the present invention may be codon optimized for expression in an organism. An organism useful with this invention may be any organism or cell thereof for which nucleic acid modification may be useful. An organism can include, but is not limited to, any animal (e.g., a mammal), any plant, any fungus, any archacon, or any bacterium. In some embodiments, the organism may be a plant or cell thereof. In some embodiments, the organism is an animal such as a mammal (e.g., a human).

[0211] The target nucleic acid may be a genomic sequence from any organism (e.g., eukaryote such as a mammal or a plant). In some embodiments, the target nucleic acid is a genomic sequence from a model organism such as, but not limited to, Escherichia coli, an immortalized human cell line (e.g., HEK293, HeLa, etc.), Caenorhabditis elegans, and/or Drosophila Melanogaster. In some embodiments, the target nucleic acid is a genomic sequence from a non-model organism. Exemplary non-model organisms include, but are not limited to crop plants (e.g., fruit crop plants, vegetable crop plants, and/or field crop plants) and/or animals such as humans, primates and/or mice. In some embodiments, the non-model organism is a crop plant such as corn, soybean, wheat, or canola. In some embodiments, the non-model organism is an animal for testing and/or use of a human therapeutic.

[0212] A target nucleic acid of any plant or plant part may be modified using the nucleic acid constructs of the invention. Any plant (or groupings of plants, for example, into a genus or higher order classification) may be modified using a fusion protein of the present invention including an angiosperm, a gymnosperm, a monocot, a dicot, a C3, C4, CAM plant, a bryophyte, a fern and/or fern ally, a microalgae, and/or a macroalgae. A plant and/or plant part useful with this invention may be a plant and/or plant part of any plant species/variety/cultivar. The term “plant part,” as used herein, includes but is not limited to, embryos, pollen, ovules, seeds, leaves, stems, shoots, flowers, branches, fruit, kernels, cars, cobs, husks, stalks, roots, root tips, anthers, plant cells including plant cells that are intact in plants and/or parts of plants, plant protoplasts, plant tissues, plant cell tissue cultures, plant calli, plant clumps, and the like. As used herein, “shoot” refers to the above ground parts including the leaves and stems. Further, as used herein, “plant cell” refers to a structural and physiological unit of the plant, which comprises a cell wall and also may refer to a protoplast. A plant cell can be in the form of an isolated single cell or can be a cultured cell or can be a part of a higher-organized unit such as, for example, a plant tissue or a plant organ.

[0213] Non-limiting examples of plants useful with the present invention include turf grasses (e.g., bluegrass, bentgrass, ryegrass, fescue), feather reed grass, tufted hair grass, miscanthus, arundo, switchgrass, vegetable crops, including artichokes, kohlrabi, arugula, leeks, asparagus, lettuce (e.g., head, leaf, romaine), malanga, melons (e.g., muskmelon, watermelon, crenshaw, honeydew, cantaloupe), cole crops (e.g., brussels sprouts, cabbage, cauliflower, broccoli, collards, kale, Chinese cabbage, bok choy), cardoni, carrots, napa, okra, onions, celery, parsley, chick peas, parsnips, chicory, peppers, potatoes, cucurbits (e.g., marrow, cucumber, zucchini, squash, pumpkin, honeydew melon, watermelon, cantaloupe), radishes, dry bulb onions, rutabaga, eggplant, salsify, escarole, shallots, endive, garlic, spinach, green onions, squash, greens, beet (sugar beet and fodder beet), sweet potatoes, chard, horseradish, tomatoes, turnips, and spices; a fruit crop such as apples, apricots, cherries, nectarines, peaches, pears, plums, prunes, cherry, quince, fig, nuts (e.g., chestnuts, pecans, pistachios, hazelnuts, pistachios, peanuts, walnuts, macadamia nuts, almonds, and the like), citrus (e.g., clementine, kumquat, orange, grapefruit, tangerine, mandarin, lemon, lime, and the like), blueberries, black raspberries, boysenberries, cranberries, currants, gooseberries, loganberries, raspberries, strawberries, blackberries, grapes (wine and table), avocados, bananas, kiwi, persimmons, pomegranate, pineapple, tropical fruits, pomes, melon, mango, papaya, and lychee, a field crop plant such as clover, alfalfa, timothy, evening primrose, meadow foam, corn/maize (field, sweet, popcorn), hops, jojoba, buckwheat, safflower, quinoa, wheat, rice, barley, rye, millet, sorghum, oats, triticale, sorghum, tobacco, kapok, a leguminous plant (beans (e.g., green and dried), lentils, peas, soybeans), an oil plant (rape, canola, mustard, poppy, olive, sunflower, coconut, castor oil plant, cocoa bean, groundnut, oil palm), duckweed, Arabidopsis, a fiber plant (cotton, flax, hemp, jute), Cannabis (e.g., Cannabis sativa, Cannabis indica, and Cannabis ruderalis), lauraceae (cinnamon, camphor), or a plant such as coffee, sugar cane, tea, and natural rubber plants; and/or a bedding plant such as a flowering plant, a cactus, a succulent and/or an ornamental plant (e.g., roses, tulips, violets), as well as trees such as forest trees (broad-leaved trees and evergreens, such as conifers; e.g., elm, ash, oak, maple, fir, spruce, cedar, pine, birch, cypress, eucalyptus, willow), as well as shrubs and other nursery stock. In some embodiments, the nucleic acid constructs of the invention and/or expression cassettes and/or vectors encoding the same may be used to modify maize, soybean, wheat, canola, rice, tomato, pepper, sunflower, raspberry, blackberry, black raspberry and/or cherry.

[0214] In some embodiments, the invention provides cells (e.g., plant cells, animal cells, bacterial cells, archacon cells, and the like) comprising the polypeptides, polynucleotides, nucleic acid constructs, expression cassettes or vectors of the invention.

[0215] The present invention further comprises a kit or kits to carry out the methods of this invention. A kit of this invention can comprise reagents, buffers, and apparatus for mixing, measuring, sorting, labeling, etc., as well as instructions and the like as would be appropriate for modifying a target nucleic acid.

[0216] In some embodiments, the invention provides a kit for comprising one or more polypeptides of the present invention (e.g., fusion proteins), nucleic acid constructs of the present invention, and/or expression cassettes and/or vectors and/or cells comprising the same as described herein, with optional instructions for the use thereof. In some embodiments, a kit may further comprise a CRISPR-Cas guide nucleic acid (corresponding to a CRISPR-Cas effector protein as provided herein, which may be encoded by a polynucleotide) and/or expression cassettes and/or vectors and or cells comprising the same. In some embodiments, a guide nucleic acid may be provided on the same expression cassette and/or vector as one or more nucleic acid constructs of the invention. In some embodiments, the guide nucleic acid may be provided on a separate expression cassette or vector from that comprising the one or more nucleic acid constructs of the invention.

[0217] Accordingly, in some embodiments, kits are provided comprising a nucleic acid construct comprising (a) a polynucleotide(s) as provided herein and (b) a promoter that drives expression of the polynucleotide(s) of (a). In some embodiments, the kit may further comprise a nucleic acid construct encoding a guide nucleic acid, wherein the construct comprises a cloning site for cloning of a nucleic acid sequence identical or complementary to a target nucleic acid sequence into backbone of the guide nucleic acid.

[0218] In some embodiments, the nucleic acid construct of the invention may be an mRNA that may encode one or more introns within the encoded polynucleotide(s). In some embodiments, the nucleic acid constructs of the invention, and/or an expression cassettes and/or vectors comprising the same, may further encode one or more selectable markers useful for identifying transformants (e.g., a nucleic acid encoding an antibiotic resistance gene, herbicide resistance gene, and the like).

[0219] A polypeptide, polynucleotide, nucleic acid construct, expression cassette, vector, composition, kit, system and/or cell of the present invention may comprise all or a portion of a sequence of one or more of SEQ ID NOs:1-308. In some embodiments, if not present in an amino acid sequence described herein and/or encoded in a nucleotide sequence described herein, the amino acid sequence and/or the nucleotide sequence may further include 1, 2, 3, 4, or 5 additional amino acid(s) or corresponding nucleotides such as a methionine at amino acid residue 1 of the amino acid sequence or the corresponding nucleotides and/or 1, 2, 3, or 4 additional amino acid(s) such as glycine or alanine or the corresponding nucleotides, which may aid in expression or enable the construction or cloning as needed for construction of a plasmid or construct or vector. In some embodiments, if present in an amino acid sequence described herein and/or encoded in a nucleotide sequence described herein, the amino acid sequence and/or the nucleotide sequence may be devoid of 1, 2, 3, 4, or 5 amino acid(s) present at amino acid residues 1-5 at the N-terminus of the amino acid sequence or corresponding nucleotides such as a methionine at amino acid residue 1 of the amino acid sequence or the corresponding nucleotides and/or 1, 2, 3, or 4 additional amino acid(s) such as glycine or alanine or the corresponding nucleotides, which may aid in expression or enable the construction or cloning as needed for construction of a plasmid or construct or vector. In some embodiments, a polypeptide, polynucleotide, nucleic acid construct, expression cassette, vector, composition, kit, system and/or cell of the present invention may comprise at least about 20%, 25%, 30%, 35%, 40%, 45%, 50%, 55%, 60%, 65%, 70%, 75%, 80%, 85%, 90%, 95%, 96%, 97%, 98%, 99%, or more consecutive amino acids of a sequence of one or more of SEQ ID NOs:1-308.

[0220] The invention will now be described with reference to the following examples. It should be appreciated that these examples are not intended to limit the scope of the claims to the invention, but are rather intended to be exemplary of certain embodiments. Any variations in the exemplified methods that occur to the skilled artisan are intended to fall within the scope of the invention.

### EXAMPLES

### Example 1

[0221] HEK293T cells were seeded into 48-well collagen-coated plates (Corning) in the absence of an antibiotic using DMEM media. At 70-80% confluency, cells were transfected with 1.5 μL of LTX (ThermoFisher Scientific) using 500 ng of the fusion protein plasmid and 500 ng of guide RNA plasmid according to manufacturer's protocol. After 3 days, cells were lysed with a crude extraction method using SDS buffer to isolate genomic DNA.

[0222] Genomic DNA was PCR amplified with genomic primers flanked by Illumina adaptor overhangs to generate approximately 300 base products. The products were amplified with another round of PCR and pooled together to generate an Illumina barcoded library. The library was cleaned up using Sera-Mag® Select (Cytiva) and quantified by SpectraMax® Quant™ dsDNA Assay Kit (Molecular Devices). Pooled amplicon libraries were sequenced using Illumina MiSeq 2x250.

[0223] Raw Illumina MiSeq paired-end reads were trimmed, merged, and aligned using CRISPResso2 (Clement, et al. (2019) Nat. Biotechnol. 37, 224-226) and processed as previously described (Kim, et al. (2022) Biorxiv 2022.12.13.520319.

TABLE 1
Spacer sequences used in the guide RNAs:

| Spacer | Target | Spacer | PAM | Direction |
|---|---|---|---|---|
| sp24 | AAVS1 | GGGGCCACTAGGGACAGGAT | TGG | − |
| | | (SEQ ID NO: 257) | | |
| sp10 | EMX1 | GAGTCCGAGCAGAAGAAGAA | GGG | + |
| | | (SEQ ID NO: 258) | | |
| sp12 | HEK2 | GAACACAAAGCATAGACTGC | GGG | + |
| | | (SEQ ID NO: 259) | | |
| sp15 | RNF2 | GTCATCTTAGTCATTACCTG | AGG | − |
| | | (SEQ ID NO: 260) | | |
| sp90 | FANCF-02 | GCACTACCTACGTCAGCACC | TGG | + |
| | | (SEQ ID NO: 261) | | |
| sp92 | HEK2 | CTGTCACAGTTAGCTCAGCC | AGG | − |
| | | (SEQ ID NO: 262) | | |
| sp94 | RNF2 | AGTTCCCATGTTTTGCTTAA | TGG | − |
| | | (SEQ ID NO: 263) | | |

[0224] The average observed frequency of adenine to guanine editing for Fusion Proteins 1˜4 (SEQ ID NOs:243-246) and a control at edited positions within the tested spacers is provided in FIGS. 2, 3, 5 and 6. Each of Fusion Proteins 1˜4 is a fusion protein comprising an adenosine deaminase, a CRISPR-Cas effector protein, and a polypeptide having a sequence of SEQ ID NO:241 or 242. N-terminal fusions of TadA7.10 or TadA8e to Cas9 were used as controls (SEQ ID NOs:264 and 265). For the experiments with Fusion Proteins 1 and 3 (SEQ ID NOs:244 and 246, respectively), the control protein had a sequence of SEQ ID NO:265, and, for the experiments with Fusion Proteins 2 and 4 (SEQ ID NOs:243 and 245, respectively), the control protein had a sequence of SEQ ID NO:264. FIGS. 4 and 7 show the log 2 (fold-change) for the fusion proteins at each of tested spacers (Table 1).

### Example 2

[0225] Corn seed embryo explants (SEEs) were transformed and cultured as previously described (Ye, et al. (2022) Front. Plant Sci. 13, 1056190). Briefly, vectors with tool and guide expression elements were transformed into Agrobacterium tumefaciens nopaline strain AB32. Binary vectors were electroporated into the AB32 competent cells followed by selection on LB medium with 30 mg/L gentamicin and 75 mg/L spectinomycin. The overnight culture was spun down and resuspended for inoculation. Rehydrated SEEs were submerged in Agrobacterium inoculum, sonicated, isolated and resuspended in media prior to co-culturing. Plants were regenerated following selection on media containing glyphosate. After approximately 8 weeks, plants were harvested, and genomic DNA was isolated and submitted for next generation sequencing.

[0226] Genomic DNA was PCR amplified with genomic primers flanked by Illumina adaptor overhangs to generate approximately 300 base products. The products were amplified with another round of PCR and pooled together to generate an Illumina barcoded library. The library was cleaned up using Sera-Mag® Select (Cytiva) and quantified by SpectraMax® Quant™ dsDNA Assay Kit (Molecular Devices). Pooled amplicon libraries were sequenced using Illumina MiSeq 2x250.

[0227] Raw Illumina MiSeq paired-end reads were trimmed, merged, and aligned using CRISPResso2 (Clement, et al. (2019) Nat. Biotechnol. 37, 224-226) and processed as previously described (Kim, et al. (2022) Biorxiv 2022.12.13.520319.

[0228] Fusion Proteins 5 and 6 (SEQ ID NOs:288 and 289, respectively), which included a polypeptide of SEQ ID NO:241 or 242 fused to the C-terminus of Cas12a via a linker of SEQ ID NO:29, were evaluated in stable corn lines. Fusion Protein 7 (SEQ ID NO:303) included a polypeptide of SEQ ID NO:302 fused to the C-terminus of Cas12a via a linker of SEQ ID NO:29, and was also evaluated in the stable corn lines. For these experiments, the control protein had a sequence of SEQ ID NO:301. Editing efficiencies were determined (Table 2) and the results are provided in FIG. 8. A genomic locus was selected (Locus171) that exhibits historically low average editing efficiency, e.g., 12.5 EE_{10%}.

TABLE 2
Editing Efficiency:

| Protein | N | ES >1% | ES >10% | EE >1% | EE >10% |
|---|---|---|---|---|---|
| Control | 58 | 6 | 5 | 10% | 9% |
| Fusion Protein 5 | 59 | 17 | 10 | 29% | 17% |
| Fusion Protein 6 | 15 | 5 | 3 | 33% | 20% |
| Fusion Protein 7 | 23 | 1 | 1 | 4% | 4% |

[0229] Editing efficiency (EE_{x %}) represents the ratio of the number of plants sampled (n) that have an editing strength(ES) higher than the indicated cutoff (i.e., 1% or 10% indels) relative to the total number of plants sampled (N). Editing strength(ES) represents the frequency of indels observed at the target site in an individual plant.

[0230] Within the locus tested, Fusion Proteins 5 and 6 both exhibited an improvement in editing efficiency relative to the control protein. The control protein displayed modest editing efficiency (EE_{10%}=9%) comparable with its historical average of 12.5%. However, both Fusion Protein 5 and Fusion Protein 6 improved EE_{10%} two-fold or more (EE_{10%} of 17% with Fusion Protein 5 and 20% with Fusion Protein 6). When analyzing the data with a less stringent cutoff, EE_{1%} was improved three-fold or more relative to the control protein (EE_{1%} of 29% for Fusion Protein 5 and 33% for Fusion Protein 6 versus an EE_{1%} of 10% for the control protein).

### Example 3

[0231] HEK293T cells were seeded into 48-well collagen-coated plates (Corning) in the absence of an antibiotic using DMEM media. At 70-80% confluency, cells were transfected with 1.5 μL of LTX (ThermoFisher Scientific) using 500 ng of the fusion protein plasmid and 500 ng of guide RNA plasmid according to manufacturer's protocol. After 3 days, cells were lysed with a crude extraction method using Triton™-X buffer, genomic DNA was isolated and submitted for next generation sequencing as described in Example 1.

TABLE 3
Spacer sequences used in the guide RNAs:

| Spacer | Target | Spacer | PAM | Direction | Indel (%) |
|---|---|---|---|---|---|
| sp24 | AAVS1 | GGGGCCACTAGGGACAGGAT | TGG | − | 46.9 ± 6.8 |
| | | (SEQ ID NO: 257) | | | |
| sp10 | EMX1 | GAGTCCGAGCAGAAGAAGAA | GGG | + | 46.5 ± 9.8 |
| | | (SEQ ID NO: 258) | | | |
| sp12 | HEK2 | GAACACAAAGCATAGACTGC | GGG | + | 55.2 ± 19.7 |
| | | (SEQ ID NO: 259) | | | |
| sp15 | RNF2 | GTCATCTTAGTCATTACCTG | AGG | − | 44.3 ± 15 |
| | | (SEQ ID NO: 260) | | | |
| sp89 | FANCF-01 | GCTCCAGAGCCGTGCGAATG | TGG | − | 45.0 ± 3.8 |
| | | (SEQ ID NO: 293) | | | |
| sp90 | FANCF-02 | GCACTACCTACGTCAGCACC | TGG | + | 48.6 ± 3.9 |
| | | (SEQ ID NO: 261) | | | |
| sp92 | HEK2 | CTGTCACAGTTAGCTCAGCC | AGG | − | 31.9 ± 10.6 |
| | | (SEQ ID NO: 262) | | | |
| sp94 | RNF2 | AGTTCCCATGTTTTGCTTAA | TGG | − | — |
| | | (SEQ ID NO: 263) | | | |

[0232] The average observed frequency of adenine to guanine editing for Fusion Protein 1 (SEQ ID NO:244), Fusion protein 3 (SEQ ID NO:246) or Fusion Protein 8 (SEQ ID NO:305) and the control at edited positions within the tested spacers is provided in FIGS. 9-11. Fusion Protein 8 (SEQ ID NO:305) was a fusion protein that included an adenosine deaminase, a CRISPR-Cas effector protein, and a polypeptide having a sequence of SEQ ID NO:302. The control protein had a sequence of SEQ ID NO:265.

[0233] Fusion Protein 1 and Fusion Protein 3 generally demonstrated improved adenine base editing at all seven loci evaluated. Fusion Protein 1 provided the strongest, most consistent improvement (FIG. 9). The greatest fold-improvement to activity was observed at PWsp92 for Fusion Protein 1 and Fusion Protein 3 (FIGS. 9-10). This spacer was somewhat recalcitrant to editing by Cas9 nuclease (PWsp92: 31.9±10.6% indels) whereas indel frequencies at all other spacers ranged from 44.3-55.2% (Table 3). This indicates that this site is likely partially occluded to Cas9 and demonstrates inclusion of SEQ ID NO:241 or SEQ ID NO:242 improve base editing. Overall, Examples 1-3 demonstrate that fusion of SEQ ID NO:241 or SEQ ID NO:242 to a CRISPR-Cas effector protein provided improvements compared to the control in two different gene editing mechanisms (base editing and cutting) to modify organisms within two different kingdoms, and increased pipeline efficiency by substantially increasing the number of recovered edited plants/cells.

[0234] The foregoing is illustrative of the present invention, and is not to be construed as limiting thereof. The invention is defined by the following claims, with equivalents of the claims to be included therein.

1. A fusion protein comprising a CRISPR-Cas effector protein and a polypeptide that has at least about 90% sequence identity to one or more of SEQ ID NOs:241-242.

2. (canceled)

3. The fusion protein of claim 1, further comprising a peptide linker that has a length of 1 amino acid residue to 40 amino acid residues.

4. The fusion protein of claim 3, wherein the linker is a peptide linker that comprises glycine and/or serine.

5. The fusion protein of claim 3, wherein the peptide linker has an amino acid sequence of one of SEQ ID NOs:1-36 or a sequence selected from: CA, CF, (GGS)ₙ, GS, SG, wherein n is an integer of 1-20.

6. The fusion protein of claim 1, wherein the CRISPR-Cas effector protein and the polypeptide are directly fused together without an intervening element between the CRISPR-Cas effector protein and the polypeptide.

7. The fusion protein of claim 1, wherein the fusion protein comprises two or more copies of the polypeptide.

8. The fusion protein of claim 1, wherein the polypeptide is fused to the N-terminus of the CRISPR-Cas effector protein.

9. The fusion protein of claim 1, wherein the polypeptide is fused to the C-terminus of the CRISPR-Cas effector protein.

10. The fusion protein of claim 1, further comprising a deaminase.

11.-12. (canceled)

13. The fusion protein of claim 10, wherein the deaminase is an adenosine deaminase.

14. The fusion protein of claim 10, wherein the deaminase is a cytidine deaminase.

15. The fusion protein of claim 1, further comprising a glycosylase inhibitor.

16. The fusion protein of claim 1, further comprising a reverse transcriptase.

17.-18. (canceled)

19. The fusion protein of claim 1, wherein the CRISPR-Cas effector protein has a sequence that has at least 90% sequence identity to one or more of SEQ ID NOs:39-65, 70-72, 88-189, 280-287, and 299-301.

20. (canceled)

21. The fusion protein of claim 1, wherein the polypeptide has a sequence of one of SEQ ID NOs:241-242.

22. The fusion protein of claim 1, further comprising a nuclear localization sequence.

23.-38. (canceled)

39. A fusion protein having an amino acid sequence comprising at least 70% sequence identity to one or more of SEQ ID Nos: 243-256, 288-292, and/or 308.

40. (canceled)

41. A complex comprising:
the fusion protein of claim 1; and
a guide nucleic acid.

42.-44. (canceled)

45. An expression cassette codon optimized for expression in an organism comprising:
a polynucleotide encoding a promoter sequence, and
a polynucleotide encoding the fusion protein of claim 1,
optionally wherein the polynucleotide encoding the fusion protein is codon-optimized for expression in the organism.

46.-50. (canceled)

51. A method of modifying a target nucleic acid, the method comprising:
contacting the target nucleic acid with:
the fusion protein of claim 1; and
a guide nucleic acid, thereby modifying the target nucleic acid.

52.-53. (canceled)

The application's sequence listing, which the Patent Office published only in electronic form, follows.

SEQUENCE LISTING (308 sequences)

SEQ ID NO: 1 - protein, 36 aa, synthetic construct
EKSKNDRSKPQPSDDRDRQPPSGEDYPEWKAPGEYE

SEQ ID NO: 2 - protein, 34 aa, synthetic construct
QEPKPQDQSSEVPPPPGSQKPGTKEPHDSKSSGP

SEQ ID NO: 3 - protein, 34 aa, synthetic construct
PDNSSGQKLQLPQPSDKPQDSREKSDSLPSDKRD

SEQ ID NO: 4 - protein, 36 aa, synthetic construct
PDNSTLQTLQLPQPTPSSTDTQQTSDTDPEDTTDVI

SEQ ID NO: 5 - protein, 30 aa, synthetic construct
STSQSDGSSVPADIDQSSDSDQSSSQGQPG

SEQ ID NO: 6 - protein, 14 aa, synthetic construct
AKPDDESQKPPQDD

SEQ ID NO: 7 - protein, 14 aa, synthetic construct
LQLEPGPTTPEYPI

SEQ ID NO: 8 - protein, 14 aa, synthetic construct
IQLPPSDTTPENPI

SEQ ID NO: 9 - protein, 12 aa, synthetic construct
ESNDNSQVPPSL

SEQ ID NO: 10 - protein, 10 aa, synthetic construct
SEQQEYPGSG

SEQ ID NO: 11 - protein, 10 aa, synthetic construct
NNSEQQENPA

SEQ ID NO: 12 - protein, 12 aa, synthetic construct
STDGSGQPKHKP

SEQ ID NO: 13 - protein, 20 aa, synthetic construct
PKPSSESGERYEQQPEPPPP

SEQ ID NO: 14 - protein, 16 aa, synthetic construct
KGGGGEPDEKRPSQSS

SEQ ID NO: 15 - protein, 14 aa, synthetic construct
YAGGTPKEPPPPNS

SEQ ID NO: 16 - protein, 14 aa, synthetic construct
PLVAGGTPFEPPPP

SEQ ID NO: 17 - protein, 14 aa, synthetic construct
PQPDERSQIPDNKE

SEQ ID NO: 18 - protein, 10 aa, synthetic construct
YTDEKPLPRS

SEQ ID NO: 19 - protein, 12 aa, synthetic construct
SHPPQEPPQSNL

SEQ ID NO: 20 - protein, 16 aa, synthetic construct
SESPSKQQPEPKSSKG

SEQ ID NO: 21 - protein, 16 aa, synthetic construct
SESPTNQQPEPQWTTD

SEQ ID NO: 22 - protein, 16 aa, synthetic construct
GGSKGPPPSPPPPQPE

SEQ ID NO: 23 - protein, 16 aa, synthetic construct
GPLPAPPPQPPPPQPN

SEQ ID NO: 24 - protein, 14 aa, synthetic construct
RPLPHDNNKQDYSK

SEQ ID NO: 25 - protein, 61 aa, synthetic construct
  VARIANT 5..61: note = up to 19 copies of GGS may be absent
SGGSGGSGGSGGSGGSGGSGGSGGSGGSGGSGGSGGSGGSGGSGGSGGSGGSGGSGGSGGS

SEQ ID NO: 26 - protein, 4 aa, synthetic construct
SGGS

SEQ ID NO: 27 - protein, 100 aa, synthetic construct
  VARIANT 6..100: note = up to 19 copies of GGGGS may be absent
GGGGSGGGGSGGGGSGGGGSGGGGSGGGGSGGGGSGGGGSGGGGSGGGGSGGGGSGGGGSGGGGSGGGGSGGGGSGGGGSGGGGSGGGGSGGGGSGGGGS

SEQ ID NO: 28 - protein, 10 aa, synthetic construct
SGGSGGSGGS

SEQ ID NO: 29 - protein, 16 aa, synthetic construct
SGSETPGTSESATPES

SEQ ID NO: 30 - protein, 32 aa, synthetic construct
SGGSSGGSSGSETPGTSESATPESSGGSSGGS

SEQ ID NO: 31 - protein, 4 aa, synthetic construct
GSSG

SEQ ID NO: 32 - protein, 6 aa, synthetic construct
GSSGSS

SEQ ID NO: 33 - protein, 8 aa, synthetic construct
GSSGSSGS

SEQ ID NO: 34 - protein, 60 aa, synthetic construct
  VARIANT 4..60: note = up to 19 copies of GSS may be absent
GSSGSSGSSGSSGSSGSSGSSGSSGSSGSSGSSGSSGSSGSSGSSGSSGSSGSSGSSGSS

SEQ ID NO: 35 - protein, 62 aa, synthetic construct
  VARIANT 4..60: note = up to 19 copies of GSS may be absent
GSSGSSGSSGSSGSSGSSGSSGSSGSSGSSGSSGSSGSSGSSGSSGSSGSSGSSGSSGSSGS

SEQ ID NO: 36 - protein, 61 aa, synthetic construct
  VARIANT 4..60: note = up to 19 copies of GSS may be absent
GSSGSSGSSGSSGSSGSSGSSGSSGSSGSSGSSGSSGSSGSSGSSGSSGSSGSSGSSGSSG

SEQ ID NO: 37 - DNA, 1592 bp, Medicago truncatula
  source 1..1592: mol_type = other DNA
actgttaataatttttaaacgtcagcgcactaaaaaaacgaaaagacggacacgtgaaaataaaaaacacacactagtttatgacgcaatactattttacttatgatttgggtacattagacaaaaccgtgaaagagatgtatcagctatgaaacctgtatacttcaatacagagacttactcatatcggatacgtacgcacgaagtatcatattaattattttaatttttaataaatattttatcggatacttatgtgatactctacatatacacaaggatatttctaagatactttatagatacgtatcctagaaaaacatgaagagtaaaaaagtgagacaatgttgtaaaaattcattataaatgtatatgattcaattttagatatgcatcagtataattgattctcgatgaaacacttaaaattatatttcttgtggaagaacgtagcgagagaggtgattcagttagacaacattaaataaaattaatgttaagttcttttaatgatgtttctctcaatatcacatcatatgaaaatgtaatatgatttataagaaaatttttaaaaaatttattttaataatcacatgtactattttttaaaaattgtatcttttataataatacaataataaagagtaatcagtgttaatttttcttcaaatataagttttattataaatcattgttaacgtatcataagtcattaccgtatcgtatcttaatttttttttaaaaaccgctaattcacgtacccgtattgtattgtacccgcacctgtatcacaatcgatcttagttagaagaattgtctcgaggcggtgcaagacagcatataatagacgtggactctcttataccaaacgttgtcgtatcacaaagggttaggtaacaagtcacagtttgtccacgtgtcacgttttaattggaagaggtgccgttggcgtaatataacagccaatcgatttttgctataaaagcaaatcaggtaaactaaacttcttcattcttttcttccccatcgctacaaaaccggttcctttggaaaagagattcattcaaacctagcacccaattccgtttcaaggtataatctactttctattcttcgattattttattattattagctactatcgtttaatcgatcttttcttttgatccgtcaaatttaaattcaattagggttttgttcttttctttcatctgattgaaatccttctgaattgaaccgtttacttgattttactgtttattgtatgatttaatcctttgtttttcaaagacagtctttagattgtgattaggggttcatataaatttttagatttggatttttgtattgtatgattcaaaaaatacgtcctttaattagattagtacatggatattttttacccgatttattgattgtcagggagaatttgatgagcaagtttttttgatgtctgttgtaaattgaattgattataattgctgatctgctgcttccagttttcataacccatattcttttaaccttgttgtacacacaatgaaaaattggtgattgattcatttgtttttctttgttttggattatacagg

SEQ ID NO: 38 - DNA, 2000 bp, Zea mays
  source 1..2000: mol_type = other DNA
gtcgtgcccctctctagagataaagagcattgcatgtctaaagtataaaaaattaccacatatttttttgtcacacttatttgaagtgtagtttatctatctctatacatatatttaaacttcactctacaaataatatagtctataatactaaaataatattagtgttttagaggatcatataaataaactgctagacatggtctaaaggataattgaatattttgacaatctacagttttatctttttagtgtgcatgtgatctctctgttttttttgcaaatagcttgacctatataatacttcatccattttattagtacatccatttaggatttagggttgatggtttctatagactaatttttagtacatccattttattctttttagtctctaaattttttaaaactaaaactctattttagttttttatttaataatttagatataaaatgaaataaaataaattgactacaaataaaacaaataccctttaagaaataaaaaaactaagcaaacatttttcttgtttcgagtagataatgacaggctgttcaacgccgtcgacgagtctaacggacaccaaccagcgaaccagcagcgtcgcgtcgggccaagcgaagcagacggcacggcatctctgtagctgcctctggacccctctcgagagttccgctccaccgttggacttgctccgctgtcggcatccagaaattgcgtggcggagcggcagacgtgaggcggcacggcaggcggcctcttcctcctctcacggcaccggcagctacgggggattcctttcccaccgctccttcgctttcccttcctcgcccgccgtaataaatagacaccccctccacaccctctttccccaacctcgtgttcgttcggagcgcacacacacgcaaccagatctcccccaaatccagccgtcggcacctccgcttcaaggtacgccgctcatcctccccccccccctctctctaccttctctagatcggcgatccggtccatggttagggcccggtagttctacttctgttcatgtttgtgttagagcaaacatgttcatgttcatgtttgtgatgatgtggtctggttgggcggtcgttctagatcggagtaggatactgtttcaagctacctggtggatttattaattttgtatctgtatgtgtgtgccatacatcttcatagttacgagtttaagatgatggatggaaatatcgatctaggataggtatacatgttgatgcgggttttactgatgcatatacagagatgctttttttctcgcttggttgtgatgatatggtctggttgggcggtcgttctagatcggagtagaatactgtttcaaactacctggtggatttattaaaggataaagggtcgttctagatcggagtagaatactgtttcaaactacctggtggatttattaaaggatctgtatgtatgtgcctacatcttcatagttacgagtttaagatgatggatggaaatatcgatctaggataggtatacatgttgatgcgggttttactgatgcatatacagagatgctttttttcgcttggttgtgatgatgtggtctggttgggcggtcgttctagatcggagtagaatactgtttcaaactacctggtggatttattaattttgtatctttatgtgtgtgccatacatcttcatagttacgagtttaagatgatggatggaaatattgatctaggataggtatacatgttgatgtgggttttactgatgcatatacatgatggcatatgcggcatctattcatatgctctaaccttgagtacctatctattataataaacaagtatgttttataattattttgatcttgatatacttggatgatggcatatgcagcagctatatgtggattttttagccctgccttcatacgctatttatttgcttggtactgtttcttttgtccgatgctcaccctgttgtttggtgatacttc

SEQ ID NO: 39 - protein, 1307 aa, Acidaminococcus sp.
MTQFEGFTNLYQVSKTLRFELIPQGKTLKHIQEQGFIEEDKARNDHYKELKPIIDRIYKTYADQCLQLVQLDWENLSAAIDSYRKEKTEETRNALIEEQATYRNAIHDYFIGRTDNLTDAINKRHAEIYKGLFKAELFNGKVLKQLGTVTTTEHENALLRSFDKFTTYFSGFYENRKNVFSAEDISTAIPHRIVQDNFPKFKENCHIFTRLITAVPSLREHFENVKKAIGIFVSTSIEEVFSFPFYNQLLTQTQIDLYNQLLGGISREAGTEKIKGLNEVLNLAIQKNDETAHIIASLPHRFIPLFKQILSDRNTLSFILEEFKSDEEVIQSFCKYKTLLRNENVLETAEALFNELNSIDLTHIFISHKKLETISSALCDHWDTLRNALYERRISELTGKITKSAKEKVQRSLKHEDINLQEIISAAGKELSEAFKQKTSEILSHAHAALDQPLPTTLKKQEEKEILKSQLDSLLGLYHLLDWFAVDESNEVDPEFSARLTGIKLEMEPSLSFYNKARNYATKKPYSVEKFKLNFQMPTLASGWDVNKEKNNGAILFVKNGLYYLGIMPKQKGRYKALSFEPTEKTSEGFDKMYYDYFPDAAKMIPKCSTQLKAVTAHFQTHTTPILLSNNFIEPLEITKEIYDLNNPEKEPKKFQTAYAKKTGDQKGYREALCKWIDFTRDFLSKYTKTTSIDLSSLRPSSQYKDLGEYYAELNPLLYHISFQRIAEKEIMDAVETGKLYLFQIYNKDFAKGHHGKPNLHTLYWTGLFSPENLAKTSIKLNGQAELFYRPKSRMKRMAHRLGEKMLNKKLKDQKTPIPDTLYQELYDYVNHRLSHDLSDEARALLPNVITKEVSHEIIKDRRFTSDKFFFHVPITLNYQAANSPSKFNQRVNAYLKEHPETPIIGIDRGERNLIYITVIDSTGKILEQRSLNTIQQFDYQKKLDNREKERVAARQAWSVVGTIKDLKQGYLSQVIHEIVDLMIHYQAVVVLENLNFGFKSKRTGIAEKAVYQQFEKMLIDKLNCLVLKDYPAEKVGGVLNPYQLTDQFTSFAKMGTQSGFLFYVPAPYTSKIDPLTGFVDPFVWKTIKNHESRKHFLEGFDFLHYDVKTGDFILHFKMNRNLSFQRGLPGFMPAWDIVFEKNETQFDAKGTPFIAGKRIVPVIENHRFTGRYRDLYPANELIALLEEKGIVFRDGSNILPKLLENDDSHAIDTMVALIRSVLQMRNSNAATGEDYINSPVRDLNGVCFDSRFQNPEWPMDADANGAYHIALKGQLLLNHLKESKDLKLQNGISNQDWLAYIQELRN

SEQ ID NO: 40 - protein, 1241 aa, Butyrivibrio proteoclasticus
MLLYENYTKRNQITKSLRLELRPQGKTLRNIKELNLLEQDKAIYALLERLKPVIDEGIKDIARDTLKNCELSFEKLYEHFLSGDKKAYAKESERLKKEIVKTLIKNLPEGIGKISEINSAKYLNGVLYDFIDKTHKDSEEKQNILSDILETKGYLALFSKFLTSRITTLEQSMPKRVIENFEIYAANIPKMQDALERGAVSFAIEYESICSVDYYNQILSQEDIDSYNRLISGIMDEDGAKEKGINQTISEKNIKIKSEHLEEKPFRILKQLHKQILEEREKAFTIDHIDSDEEVVQVTKEAFEQTKEQWENIKKINGFYAKDPGDITLFIVVGPNQTHVLSQLIYGEHDRIRLLLEEYEKNTLEVLPRRTKSEDARYDKFVNAVPKKVAKESHTFDGLQKMTGDDRLFILYRDELARNYMRIKEAYGTFERDILKSRRGIKGNRDVQESLVSFYDELTKFRSALRIINSGNDEKADPIFYNTFDGIFEKANRTYKAENLCRNYVTKSPADDARIMASCLGTPARLRTHWWNGEENFAINDVAMIRRGDEYYYFVLTPDVKPVDLKTKDETDAQIFVQRKGAKSFLGLPKALFKCILEPYFESPEHKNDKNCVIEEYVSKPLTIDRRAYDIFKNGTFKKTNIGIDGLTEEKFKDDCRYLIDVYKEFIAVYTRYSCFNMSGLKRADEYNDIGEFFSDVDTRLCTMEWIPVSFERINDMVDKKEGLLFLVRSMFLYNRPRKPYERTFIQLFSDSNMEHTSMLLNSRAMIQYRAASLPRRVTHKKGSILVALRDSNGEHIPMHIREAIYKMKNNFDISSEDFIMAKAYLAEHDVAIKKANEDIIRNRRYTEDKFFLSLSYTKNADISARTLDYINDKVEEDTQDSRMAVIVTRNLKDLTYVAVVDEKNNVLEEKSLNEIDGVNYRELLKERTKIKYHDKTRLWQYDVSSKGLKEAYVELAVTQISKLATKYNAVVVVESMSSTFKDKFSFLDEQIFKAFEARLCARMSDLSFNTIKEGEAGSISNPIQVSNNNGNSYQDGVIYFLNNAYTRTLCPDTGFVDVFDKTRLITMQSKRQFFAKMKDIRIDDGEMLFTFNLEEYPTKRLLDRKEWTVKIAGDGSYFDKDKGEYVYVNDIVREQIIPALLEDKAVFDGNMAEKFLDKTAISGKSVELIYKWFANALYGIITKKDGEKIYRSPITGTEIDVSKNTTYNFGKKFMFKQEYRGDGDFLDAFLNYMQAQDIAV

SEQ ID NO: 41 - protein, 1238 aa, Methanoplasma termitum
MNNYDEFTKLYPIQKTIRFELKPQGRTMEHLETFNFFEEDRDRAEKYKILKEAIDEYHKKFIDEHLTNMSLDWNSLKQISEKYYKSREEKDKKVFLSEQKRMRQEIVSEFKKDDRFKDLFSKKLFSELLKEEIYKKGNHQEIDALKSFDKFSGYFIGLHENRKNMYSDGDEITAISNRIVNENFPKFLDNLQKYQEARKKYPEWIIKAESALVAHNIKMDIVFSLEYFNKVLNQEGIQRYNLALGGYVTKSGEKMMGLNDALNLAHQSEKSSKGRIHMTPLFKQILSEKESFSYIPDVFTEDSQLLPSIGGFFAQIENDKDGNIFDRALELISSYAEYDTERIYIRQADINRVSNVIFGEWGTLGGLMREYKADSINDINLERTCKKVDKWLDSKEFALSDVLEAIDRTGNNDAFNEYISKMRTAREKIDAARKEMKFISEKISGDEESIHIIKTLLDSVQQFLHFFNLFKARQDIPLDGAFYAEFDEVHSKLFAIVPLYNKVRNYLTKNNLNTKKIKLNFKNPTLANGWDQNKVYDYASLIFLRDGNYYLGIINPKRKKNIKFEQGSGNGPFYRKMVYKQIPGPNKNLRPVFLTSTKGKKEYKPSKEIIEGYEADKHIRGDKFDLDFCHKLIDFFKESIEKHKDWSKFNFYFSPTESYGDISEFYLDVEKQGYRMHFENISAETIDEYVEKGDLFLFQIYNKDFVKAATGKKDMHTIYWNAAFSPENLQDVVVKLNGEAELFYRDKSDIKEIVHREGEILVNRTYNGRTPVPDKIHKKLTDYHNGRTKDLGEAKEYLDKVRYFKAHYDITKDRRYLNDKIYFHVPLTLNFKANGKKNLNKMVIEKFLSDEKAHIIGIDRGERNLLYYSIIDRSGKIIDQQSLNVIDGFDYREKLNQREIEMKDARQSWNAIGKIKDLKEGYLSKAVHEITKMAIQYNAIVVMEELNYGFKRGRFKVEKQIYQKFENMLIDKMNYLVFKDAPDESPGGVLNAYQLTNPLESFAKLGKQTGILFYVPAAYTSKIDPTTGFVNLFNTSSKTNAQERKEFLQKFESISYSAKDGGIFAFAFDYRKFGTSKTDHKNVWTAYTNGERMRYIKEKKRNELFDPSKEIKEALTSSGIKYDGGQNILPDILRSNNNGLIYTMYSSFIAAIQMRVYDGKEDYIISPIKNSKGEFFRTDPKRRELPIDADANGAYNIALRGELTMRAIAEKFDPDSEKMAKLELKHKDWFEFMQTRGD

SEQ ID NO: 42 - protein, 1281 aa, Eubacterium eligens
MNGNRSIVYREFVGVIPVAKTLRNELRPVGHTQEHIIQNGLIQEDELRQEKSTELKNIMDDYYREYIDKSLSGVTDLDFTLLFELMNLVQSSPSKDNKKALEKEQSKMREQICTHLQSDSNYKNIFNAKLLKEILPDFIKNYNQYDVKDKAGKLETLALFNGFSTYFTDFFEKRKNVFTKEAVSTSIAYRIVHENSLIFLANMTSYKKISEKALDEIEVIEKNNQDKMGDWELNQIFNPDFYNMVLIQSGIDFYNEICGVVNAHMNLYCQQTKNNYNLFKMRKLHKQILAYTSTSFEVPKMFEDDMSVYNAVNAFIDETEKGNIIGKLKDIVNKYDELDEKRIYISKDFYETLSCFMSGNWNLITGCVENFYDENIHAKGKSKEEKVKKAVKEDKYKSINDVNDLVEKYIDEKERNEFKNSNAKQYIREISNIITDTETAHLEYDDHISLIESEEKADEMKKRLDMYMNMYHWAKAFIVDEVLDRDEMFYSDIDDIYNILENIVPLYNRVRNYVTQKPYNSKKIKLNFQSPTLANGWSQSKEFDNNAIILIRDNKYYLAIFNAKNKPDKKIIQGNSDKKNDNDYKKMVYNLLPGANKMLPKVFLSKKGIETFKPSDYIISGYNAHKHIKTSENFDISFCRDLIDYFKNSIEKHAEWRKYEFKFSATDSYSDISEFYREVEMQGYRIDWTYISEADINKLDEEGKIYLFQIYNKDFAENSTGKENLHTMYFKNIFSEENLDKIIKLNGQAELFYRRASVKNPVKHKKDSVLVNKTYKNQLDNGDVVRIPIPDDIYNEIYKMYNGYIKESDLSEAAKEYLDKVEVRTAQKDIVKDYRYTVDKYFIHTPITINYKVTARNNVNDMVVKYIAQNDDIHVIGIDRGERNLIYISVIDSHGNIVKQKSYNILNNYDYKKKLVEKEKTREYARKNWKSIGNIKELKEGYISGVVHEIAMLIVEYNAIIAMEDLNYGFKRGRFKVERQVYQKFESMLINKLNYFASKEKSVDEPGGLLKGYQLTYVPDNIKNLGKQCGVIFYVPAAFTSKIDPSTGFISAFNFKSISTNASRKQFFMQFDEIRYCAEKDMFSFGFDYNNFDTYNITMGKTQWTVYTNGERLQSEFNNARRTGKTKSINLTETIKLLLEDNEINYADGHDIRIDMEKMDEDKKSEFFAQLLSLYKLTVQMRNSYTEAEEQENGISYDKIISPVINDEGEFFDSDNYKESDDKECKMPKDADANGAYCIALKGLYEVLKIKSEWTEDGFDRNCLKLPHAEWLDFIQNKRYE

SEQ ID NO: 43 - protein, 1300 aa, Francisella tularensis
MSIYQEFVNKYSLSKTLRFELIPQGKTLENIKARGLILDDEKRAKDYKKAKQIIDKYHQFFIEEILSSVCISEDLLQNYSDVYFKLKKSDDDNLQKDFKSAKDTIKKQISEYIKDSEKFKNLFNQNLIDAKKGQESDLILWLKQSKDNGIELFKANSDITDIDEALEIIKSFKGWTTYFKGFHENRKVNYSSNDIPTSIIYRIVDDNLPKFLENKAKYESLKDKAPEAINYEQIKKDLAEELTFDIDYKTSEVNQRVFSLDEVFEIANFNNYLNQSGITKFNTIIGGKFVNGENTKRKGINEYINLYSQQINDKTLKKYKMSVLFKQILSDTESKSFVIDKLEDDSDVVTTMQSFYEQIAAFKTVEEKSIKETLSLLFDDLKAQKLDLSKIYFKNDKSLTDLSQQVFDDYSVIGTAVLEYITQQIAPKNLDNPSKKEQELIAKKTEKAKYLSLETIKLALEEFNKHRDIDKQCRFEEILANFAAIPMIFDEIAQNKDNLAQISIKYQNQGKKDLLQASAEDDVKAIKDLLDQTNNLLHKLKIFHISQSEDKANILDKDEHFYLVFEECYFELANIVPLYNKIRNYITQKPYSDEKFKLNFENSTLANGWDKNKEPDNTAILFIKDDKYYLGVMNKKNNKIFDDKAIKENKGEGYKKIVYKLLPGANKMLPKVFFSAKSIKFYNPSEDILRIRNHSTHTKNGSPQKGYEKFEFNIEDCRKFIDFYKQSISKHPEWKDFGFRFSDTQRYNSIDEFYREVENQGYKLTFENISESYIDSVVNQGKLYLFQIYNKDFSAYSKGRPNLHTLYWKALFDERNLQDVVYKLNGEAELFYRKQSIPKKITHPAKEAIANKNKDNPKKESVFEYDLIKDKRFTEDKFFFHCPITINFKSSGANKFNDEINLLLKEKANDVHILSIDRGERHLAYYTLVDGKGNIIKQDTFNIIGNDRMKTNYHDKLAAIEKDRDSARKDWKKINNIKEMKEGYLSQVVHEIAKLVIEYNAIVVFEDLNFGFKRGRFKVEKQVYQKLEKMLIEKLNYLVFKDNEFDKTGGVLRAYQLTAPFETFKKMGKQTGIIYYVPAGFTSKICPVTGFVNQLYPKYESVSKSQEFFSKFDKICYNLDKGYFEFSFDYKNFGDKAAKGKWTIASFGSRLINFRNSDKNHNWDTREVYPTKELEKLLKDYSIEYGHGECIKAAICGESDKKFFAKLTSVLNTILQMRNSKTGTELDYLISPVADVNGNFFDSRQAPKNMPQDADANGAYHIGLKGLMLLGRIKNNQEGKKLNLVIKNEEYFEFVQNRNN

SEQ ID NO: 44 - protein, 1206 aa, unidentified
  source 1..1206: note = Lachnospiraceae bacterium strain MA2020 Lb2Cas12a
MYYESLTKQYPVSKTIRNELIPIGKTLDNIRQNNILESDVKRKQNYEHVKGILDEYHKQLINEALDNCTLPSLKIAAEIYLKNQKEVSDREDFNKTQDLLRKEVVEKLKAHENFTKIGKKDILDLLEKLPSISEDDYNALESFRNFYTYFTSYNKVRENLYSDKEKSSTVAYRLINENFPKFLDNVKSYRFVKTAGILADGLGEEEQDSLFIVETFNKTLTQDGIDTYNSQVGKINSSINLYNQKNQKANGFRKIPKMKMLYKQILSDREESFIDEFQSDEVLIDNVESYGSVLIESLKSSKVSAFFDALRESKGKNVYVKNDLAKTAMSVIVFENWRTFDDLLNQEYDLANENKKKDDKYFEKRQKELKKNKSYSLEHLCNLSEDSCNLIENYIHQISDDIENIIINNETFLRIVINEHDRSRKLAKNRKAVKAIKDFLDSIKVLERELKLINSSGQELEKDLIVYSAHEELLVELKQVDSLYNMTRNYLTKKPFSTEKVKLNFNRSTLLNGWDRNKETDNLGVLLLKDGKYYLGIMNTSANKAFVNPPVAKTEKVFKKVDYKLLPVPNQMLPKVFFAKSNIDFYNPSSEIYSNYKKGTHKKGNMFSLEDCHNLIDFFKESISKHEDWSKFGFKFDTQASYNDISEFYREVEKQGYKLTYTDIDETYINDLIERNELYLFQIYNKDFSMYSKGKLNLHTLYFMMLFDQRNIDDVVYKLNGEAEVFYRPASISEDELIIHKAGEEIKNKNPNRARTKETSTFSYDIVKDKRYSKDKFTLHIPITMNFGVDEVKRFNDAVNSAIRIDENVNVIGIDRGERNLLYVVVIDSKGNILEQISLNSIINKEYDIETDYHALLDEREGGRDKARKDWNTVENIRDLKAGLYLQVVNVVAKLVLKYNAIICLEDLNFGFKRGRQKVEKQVYQKFEKMLIDKLNYLVIDKSREQTSPKELGGALNALQLTSKFKSFKELGKQSGVIYYVPAYLTSKIDPTTGFANLFYMKCENVEKSKRFFDGFDFIRFNALENVFEFGFDYRSFTQRACGINSKWTVCTNGERIIKYRNPDKNNMFDEKVVVVTDEMKNLFEQYKIPYEDGRNVKDMIISNEEAEFYRRLYRLLQQTLQMRNSTSDGTRDYIISPVKNKREAYFNSELSDGSVPKDADANGAYNIARKGLWVLEQIRQKSEGEKINLAMTNAEWLEYAQTHLL

SEQ ID NO: 45 - protein, 1233 aa, unidentified
  source 1..1233: note = Lachnospiraceae bacterium strain MC2017 Lb3Cas12a
MDYGNGQFERRAPLTKTITLRLKPIGETRETIREQKLLEQDAAFRKLVETVTPIVDDCIRKIADNALCHFGTEYDFSCLGNAISKNDSKAIKKETEKVEKLLAKVLTENLPDGLRKVNDINSAAFIQDTLTSFVQDDADKRVLIQELKGKTVLMQRFLTTRITALTVWLPDRVFENFNIFIENAEKMRILLDSPLNEKIMKFDPDAEQYASLEFYGQCLSQKDIDSYNLIISGIYADDEVKNPGINEIVKEYNQQIRGDKDESPLPKLKKLHKQILMPVEKAFFVRVLSNDSDARSILEKILKDTEMLPSKIIEAMKEADAGDIAVYGSRLHELSHVIYGDHGKLSQIIYDKESKRISELMETLSPKERKESKKRLEGLEEHIRKSTYTFDELNRYAEKNVMAAYIAAVEESCAEIMRKEKDLRTLLSKEDVKIRGNRHNTLIVKNYFNAWTVFRNLIRILRRKSEAEIDSDFYDVLDDSVEVLSLTYKGENLCRSYITKKIGSDLKPEIATYGSALRPNSRWWSPGEKFNVKFHTIVRRDGRLYYFILPKGAKPVELEDMDGDIECLQMRKIPNPTIFLPKLVFKDPEAFFRDNPEADEFVFLSGMKAPVTITRETYEAYRYKLYTVGKLRDGEVSEEEYKRALLQVLTAYKEFLENRMIYADLNFGFKDLEEYKDSSEFIKQVETHNTFMCWAKVSSSQLDDLVKSGNGLLFEIWSERLESYYKYGNEKVLRGYEGVLLSILKDENLVSMRTLLNSRPMLVYRPKESSKPMVVHRDGSRVVDRFDKDGKYIPPEVHDELYRFFNNLLIKEKLGEKARKILDNKKVKVKVLESERVKWSKFYDEQFAVTFSVKKNADCLDTTKDLNAEVMEQYSESNRLILIRNTTDILYYLVLDKNGKVLKQRSLNIINDGARDVDWKERFRQVTKDRNEGYNEWDYSRTSNDLKEVYLNYALKEIAEAVIEYNAILIIEKMSNAFKDKYSFLDDVTFKGFETKKLAKLSDLHFRGIKDGEPCSFTNPLQLCQNDSNKILQDGVIFMVPNSMTRSLDPDTGFIFAINDHNIRTKKAKLNFLSKFDQLKVSSEGCLIMKYSGDSLPTHNTDNRVWNCCCNHPITNYDRETKKVEFIEEPVEELSRVLEENGIETDTELNKLNERENVPGKVVDAIYSLVLNYLRGTVSGVAGQRAVYYSPVTGKKYDISFIQAMNLNRKCDYYRIGSKERGEWTDFVAQLIN

SEQ ID NO: 46 - protein, 1227 aa, unidentified
  source 1..1227: note = Lachnospiraceae bacterium
MSKLEKFTNCYSLSKTLRFKAIPVGKTQENIDNKRLLVEDEKRAEDYKGVKKLLDRYYLSFINDVLHSIKLKNLNNYISLFRKKTRTEKENKELENLEINLRKEIAKAFKGNEGYKSLFKKDIIETILPEFLDDKDEIALVNSFNGFTTAFTGFFDNRENMFSEEAKSTSIAFRCINENLTRYISNMDIFEKVDAIFDKHEVQEIKEKILNSDYDVEDFFEGEFFNFVLTQEGIDVYNAIIGGFVTESGEKIKGLNEYINLYNQKTKQKLPKFKPLYKQVLSDRESLSFYGEGYTSDEEVLEVFRNTLNKNSEIFSSIKKLEKLFKNFDEYSSAGIFVKNGPAISTISKDIFGEWNVIRDKWNAEYDDIHLKKKAVVTEKYEDDRRKSFKKIGSFSLEQLQEYADADLSVVEKLKEIIIQKVDEIYKVYGSSEKLFDADFVLEKSLKKNDAVVAIMKDLLDSVKSFENYIKAFFGEGKETNRDESFYGDFVLAYDILLKVDHIYDAIRNYVTQKPYSKDKFKLYFQNPQFMGGWDKDKETDYRATILRYGSKYYLAIMDKKYAKCLQKIDKDDVNGNYEKINYKLLPGPNKMLPKVFFSKKWMAYYNPSEDIQKIYKNGTFKKGDMFNLNDCHKLIDFFKDSISRYPKWSNAYDFNFSETEKYKDIAGFYREVEEQGYKVSFESASKKEVDKLVEEGKLYMFQIYNKDFSDKSHGTPNLHTMYFKLLFDENNHGQIRLSGGAELFMRRASLKKEELVVHPANSPIANKNPDNPKKTTTLSYDVYKDKRFSEDQYELHIPIANINKCPKNIFKINTEVRVLLKHDDNPYVIGIDRGERNLLYIVVVDGKGNIVEQYSLNEIINNFNGIRIKTDYHSLLDKKEKERFEARQNWTSIENIKELKAGYISQVVHKICELVEKYDAVIALEDLNSGFKNSRVKVEKQVYQKFEKMLIDKLNYMVDKKSNPCATGGALKGYQITNKFESFKSMSTQNGFIFYIPAWLTSKIDPSTGFVNLLKTKYTSIADKKFISSFDRIMYVPEEDLFEFALDYKNFSRTDADYIKKWKLYSYGNRIRIFRNPKKNNVFDWEEVCLTSAYKELFNKYGINYQQGDIRALLCEQSDKAFYSSFMALMSLMLQMRNSITGRTDVDFLISPVKNSDGIFYDSRNYEAQENAILPKNADANGAYNIARKVLWAIGQFKKAEDEKLDKVKIASNKEWLEYAQTSVKH

SEQ ID NO: 47 - protein, 1264 aa, Leptospira inadai
MEDYSGFVNIYSIQKTLRFELKPVGKTLEHIEKKGFLKKDKIRAEDYKAVKKIIDKYHRAYIEEVFDSVLHQKKKKDKTRFSTQFIKEIKEFSELYYKTEKNIPDKERLEALSEKLRKMLVGAFKGEFSEEVAEKYNKNLFSKELIRNEIEKFCETDEERKQVSNFKSFTTYFTGFHSNRQNIYSDEKKSTAIGYRIIHQNLPKFLDNLKIIESIQRRFKDFPWSDLKKNLKKIDKNIKLTEYFSIDGFVNVLNQKGIDAYNTILGGKSEESGEKIQGLNEYINLYRQKNNIDRKNPLNVKILFKQILGDRETKSFIPEAFPDDQSVLNSITEFAKYLKLDKKKKSIIAELKKFLSSFNRYELDGIYLANDNSLASISTFLFDDWSFIKKSVSFKYDESVGDPKKKIKSPLKYEKEKEKWLKQKYYTISFLNDAIESYSKSQDEKRVKIRLEAYFAEFKSKDDAKKQFDLLERIEEAYAIVEPLLGAEYPRDRNLKADKKEVGKIKDFLDSIKSLQFFLKPLLSAEIFDEKDLGFYNQLEGYYEEIDISGHLYNKVRNYLTGKIYSKEKFKLNFENSTLLKGWDENREVANLCVIFREDQKYYLGVMDKENNTILSDIPKVKPNELFYEKMVYKLIPTPHMQLPRIIFSSDNLSIYNPSKSILKIREAKSFKEGKNFKLKDCHKFIDFYKESISKNEDWSRFDFKFSKTSSYENISEFYREVERQGYNLDFKKVSKFYIDSLVEDGKLYLFQIYNKDFSIFSKGKPNLHTIYFRSLFSKENLKDVCLKLNGEAEMFFRKKSINYDEKKKREGHHPELFEKLKYPILKDKRYSEDKFQFHLPISLNFKSKERLNFNLKVNEFLKRNKDINIIGIDRGERNLLYLVMINQKGEILKQTLLDSMQSGKGRPEINYKEKLQEKEIERDKARKSWGTVENIKELKEGYLSIVIHQISKLMVENNAIVVLEDLNIGFKRGRQKVERQVYQKFEKMLIDKLNFLVFKENKPTEPGGVLKAYQLTDEFQSFEKLSKQTGFLFYVPSWNTSKIDPRTGFIDFLHPAYENIEKAKQWINKFDSIRFNSKMDWFEFTADTRKFSENLMLGKNRVWVICTTNVERYFTSKTANSSIQYNSIQITEKLKELFVDIPFSNGQDLKPEILRKNDAVFFKSLLFYIKTTLSLRQNNGKKGEEEKDFILSPVVDSKGRFFNSLEASDDEPKDADANGAYHIALKGLMNLLVLNETKEENLSRPKWKIKNKDWLEFVWERNR

SEQ ID NO: 48 - protein, 1373 aa, Moraxella bovoculi
MLFQDFTHLYPLSKTVRFELFIDRTLEHIHAKNFLSQDETMADMHQKVKVILDDYHRDFIADMMGEVKLTKLAEFYDVYLKFRKNPKDDELQKAQLKDLQAVLRKEIVKPIGNGGKYKAGYDRLFGAKLFKDGKELGDLAKFVIAQEGESSPKLAHLAHFEKFSTYFTGFHDNRKNMYSDEDKHTAIAYRLIHENLPRFIDNLQILTTIKQKHSALYDQIINELTASGLDVSLASHLDGYHKLLTQEGITAYNTLLGGISGEAGSPKIQGINELINSHHNQHCHKSERIAKLRPLHKQILSDGMSVSFLPSKFADDSEMCQAVNEFYRHYADVFAKVQSLFDGFDDHQKDGIYVEHKNLNELSKQAFGDFALLGRVLDGYYVDVVNPEFNERFAKAKTDNAKAKLTKEKDKFIKGVHSLASLEQAIEHYTARHDDESVQAGKLGQYFKHGLAGVDNPIQKIHNNHSTIKGFLERERPAGERALPKIKSGKNPEMTQLRQLKELLDNALNVAHFAKLLTTKTTLDNQDGNFYGEFGVLYDELAKIPTLYNKVRDYLSQKPFSTEKYKLNFGNPTLLNGWDLNKEKDNFGVILQKDGCYYLALLDKAHKKVFDNAPNTGKSIYQKMIYKYLEVRKQFPKVFFSKEAIAINYHPSKELVEIKDKGRQRSDDERLKLYRFILECLKIHPKYDKKFEGAIGDIQLFKKDKKGREVPISEKDLFKDINGIFSSKPKLEMEDFFIGEFKRYNPSQDLVDQYNIYKKIDSNDNRKKENFYNNHPKFKKDLVRYYYESMCKHEEWEESFEFSKKLQDIGCYVDVNELFTEIETRRLNYKISFCNINADYIDELVEQGQLYLFQIYNKDFSPKAHGKPNLHTLYFKALFSEDNLADPIYKLNGEAQIFYRKASLDMNETTIHRAGEVLENKNPDNPKKRQFVYDIIKDKRYTQKDFMLHVPITMNFGVQGMTIKEFNKKVNQSIQQYDEVNVIGIDRGERHLLYLTVINSKGEILEQCSLNDITTASANGTQMTTPYHKILDKREIERLNARVGWGEIETIKELKSGYLSHVVHQISQLMLKYNAIVVLEDLNFGFKRGRFKVEKQIYQNFENALIKKLNHLVLKDKADDEIGSYKNALQLTNNFTDLKSIGKQTGFLFYVPAWNTSKIDPETGFVDLLKPRYENIQASQAFFGKFDKICYNADKDYFEFHIDYAKFTDKAKNSRQIWTICSHGDKRYVYDKTANQNKGAAKGINVNDILKSLFARHHINEKQPNLVMDICQNNDKEFHKSLMYLLKTLLALRYSNASSDEDFILSPVANDEGVFFNSALADDTQPQNADANGAYHIALKGLWLLNELKNSDDLNKVKLAIDNQTWLNFAQNR

SEQ ID NO: 49 - protein, 1352 aa, unidentified
  source 1..1352: note = Parcubacteria bacterium
MENIFDQFIGKYSLSKTLRFELKPVGKTEDFLKINKVFEKDQTIDDSYNQAKFYFDSLHQKFIDAALASDKTSELSFQNFADVLEKQNKIILDKKREMGALRKRDKNAVGIDRLQKEINDAEDIIQKEKEKIYKDVRTLFDNEAESWKTYYQEREVDGKKITESKADLKQKGADFLTAAGILKVLKYEFPEEKEKEFQAKNQPSLFVEEKENPGQKRYIFDSFDKFAGYLTKFQQTKKNLYAADGTSTAVATRIADNFIIFHQNTKVFRDKYKNNHTDLGFDEENIFEIERYKNCLLQREIEHIKNENSYNKIIGRINKKIKEYRDQKAKDTKLTKSDFPFFKNLDKQILGEVEKEKQLIEKTREKTEEDVLIERFKEFIENNEERFTAAKKLMNAFCNGEFESEYEGIYLKNKAINTISRRWFVSDRDFELKLPQQKSKNKSEKNEPKVKKFISIAEIKNAVEELDGDIFKAVFYDKKIIAQGGSKLEQFLVIWKYEFEYLFRDIERENGEKLLGYDSCLKIAKQLGIFPQEKEAREKATAVIKNYADAGLGIFQMMKYFSLDDKDRKNTPGQLSTNFYAEYDGYYKDFEFIKYYNEFRNFITKKPFDEDKIKLNFENGALLKGWDENKEYDFMGVILKKEGRLYLGIMHKNHRKLFQSMGNAKGDNANRYQKMIYKQIADASKDVPRLLLTSKKAMEKFKPSQEILRIKKEKTFKRESKNFSLRDLHALIEYYRNCIPQYSNWSFYDFQFQDTGKYQNIKEFTDDVQKYGYKISFRDIDDEYINQALNEGKMYLFEVVNKDIYNTKNGSKNLHTLYFEHILSAENLNDPVFKLSGMAEIFQRQPSVNEREKITTQKNQCILDKGDRAYKYRRYTEKKIMFHMSLVLNTGKGEIKQVQFNKIINQRISSSDNEMRVNVIGIDRGEKNLLYYSVVKQNGEIIEQASLNEINGVNYRDKLIEREKERLKNRQSWKPVVKIKDLKKGYISHVIHKICQLIEKYSAIVVLEDLNMRFKQIRGGIERSVYQQFEKALIDKLGYLVFKDNRDLRAPGGVLNGYQLSAPFVSFEKMRKQTGILFYTQAEYTSKTDPITGFRKNVYISNSASLDKIKEAVKKFDAIGWDGKEQSYFFKYNPYNLADEKYKNSTVSKEWAIFASAPRIRRQKGEDGYWKYDRVKVNEEFEKLLKVWNFVNPKATDIKQEIIKKIKAGDLQGEKELDGRLRNFWHSFIYLFNLVLELRNSFSLQIKIKAGEVIAVDEGVDFIASPVKPFFTTPNPYIPSNLCWLAVENADANGAYNIARKGVMILKKIREHAKKDPEFKKLPNLFISNAEWDEAARDWGKYAGTTALNLDH

SEQ ID NO: 50 - protein, 1260 aa, Porphyromonas crevioricanis
MDSLKDFTNLYPVSKTLRFELKPVGKTLENIEKAGILKEDEHRAESYRRVKKIIDTYHKVFIDSSLENMAKMGIENEIKAMLQSFCELYKKDHRTEGEDKALDKIRAVLRGLIVGAFTGVCGRRENTVQNEKYESLFKEKLIKEILPDFVLSTEAESLPFSVEEATRSLKEFDSFTSYFAGFYENRKNIYSTKPQSTAIAYRLIHENLPKFIDNILVFQKIKEPIAKELEHIRADFSAGGYIKKDERLEDIFSLNYYIHVLSQAGIEKYNALIGKIVTEGDGEMKGLNEHINLYNQQRGREDRLPLFRPLYKQILSDREQLSYLPESFEKDEELLRALKEFYDHIAEDILGRTQQLMTSISEYDLSRIYVRNDSQLTDISKKMLGDWNAIYMARERAYDHEQAPKRITAKYERDRIKALKGEESISLANLNSCIAFLDNVRDCRVDTYLSTLGQKEGPHGLSNLVENVFASYHEAEQLLSFPYPEENNLIQDKDNVVLIKNLLDNISDLQRFLKPLWGMGDEPDKDERFYGEYNYIRGALDQVIPLYNKVRNYLTRKPYSTRKVKLNFGNSQLLSGWDRNKEKDNSCVILRKGQNFYLAIMNNRHKRSFENKMLPEYKEGEPYFEKMDYKFLPDPNKMLPKVFLSKKGIEIYKPSPKLLEQYGHGTHKKGDTFSMDDLHELIDFFKHSIEAHEDWKQFGFKFSDTATYENVSSFYREVEDQGYKLSFRKVSESYVYSLIDQGKLYLFQIYNKDFSPCSKGTPNLHTLYWRMLFDERNLADVIYKLDGKAEIFFREKSLKNDHPTHPAGKPIKKKSRQKKGEESLFEYDLVKDRRYTMDKFQFHVPITMNFKCSAGSKVNDMVNAHIREAKDMHVIGIDRGERNLLYICVIDSRGTILDQISLNTINDIDYHDLLESRDKDRQQEHRNWQTIEGIKELKQGYLSQAVHRIAELMVAYKAVVALEDLNMGFKRGRQKVESSVYQQFEKQLIDKLNYLVDKKKRPEDIGGLLRAYQFTAPFKSFKEMGKQNGFLFYIPAWNTSNIDPTTGFVNLFHVQYENVDKAKSFFQKFDSISYNPKKDWFEFAFDYKNFTKKAEGSRSMWILCTHGSRIKNFRNSQKNGQWDSEEFALTEAFKSLFVRYEIDYTADLKTAIVDEKQKDFFVDLLKLFKLTVQMRNSWKEKDLDYLISPVAGADGRFFDTREGNKSLPKDADANGAYNIALKGLWALRQIRQTSEGGKLKLAISNKEWLQFVQERSYEKD

SEQ ID NO: 51 - protein, 1324 aa, Prevotella disiens
MENYQEFTNLFQLNKTLRFELKPIGKTCELLEEGKIFASGSFLEKDKVRADNVSYVKKEIDKKHKIFIEETLSSFSISNDLLKQYFDCYNELKAFKKDCKSDEEEVKKTALRNKCTSIQRAMREAISQAFLKSPQKKLLAIKNLIENVFKADENVQHFSEFTSYFSGFETNRENFYSDEEKSTSIAYRLVHDNLPIFIKNIYIFEKLKEQFDAKTLSEIFENYKLYVAGSSLDEVFSLEYFNNTLTQKGIDNYNAVIGKIVKEDKQEIQGLNEHINLYNQKHKDRRLPFFISLKKQILSDREALSWLPDMFKNDSEVIDALKGFYIEDGFENNVLTPLATLLSSLDKYNLNGIFIRNNEALSSLSQNVYRNFSIDEAIDAQNAELQTFNNYELIANALRAKIKKETKQGRKSFEKYEEYIDKKVKAIDSLSIQEINELVENYVSEFNSNSGNMPRKVEDYFSLMRKGDFGSNDLIENIKTKLSAAEKLLGTKYQETAKDIFKKDENSKLIKELLDATKQFQHFIKPLLGTGEEADRDLVFYGDFLPLYEKFEELTLLYNKVRNRLTQKPYSKDKIRLCFNKPKLMTGWVDSKTEKSDNGTQYGGYLFRKKNEIGEYDYFLGISSKAQLFRKNEAVIGDYERLDYYQPKANTIYGSAYEGENSYKEDKKRLNKVIIAYIEQIKQTNIKKSIIESISKYPNISDDDKVTPSSLLEKIKKVSIDSYNGILSFKSFQSVNKEVIDNLLKTISPLKNKAEFLDLINKDYQIFTEVQAVIDEICKQKTFIYFPISNVELEKEMGDKDKPLCLFQISNKDLSFAKTFSANLRKKRGAENLHTMLFKALMEGNQDNLDLGSGAIFYRAKSLDGNKPTHPANEAIKCRNVANKDKVSLFTYDIYKNRRYMENKFLFHLSIVQNYKAANDSAQLNSSATEYIRKADDLHIIGIDRGERNLLYYSVIDMKGNIVEQDSLNIIRNNDLETDYHDLLDKREKERKANRQNWEAVEGIKDLKKGYLSQAVHQIAQLMLKYNAIIALEDLGQMFVTRGQKIEKAVYQQFEKSLVDKLSYLVDKKRPYNELGGILKAYQLASSITKNNSDKQNGFLFYVPAWNTSKIDPVTGFTDLLRPKAMTIKEAQDFFGAFDNISYNDKGYFEFETNYDKFKIRMKSAQTRWTICTFGNRIKRKKDKNYWNYEEVELTEEFKKLFKDSNIDYENCNLKEEIQNKDNRKFFDDLIKLLQLTLQMRNSDDKGNDYIISPVANAEGQFFDSRNGDKKLPLDADANGAYNIARKGLWNIRQIKQTKNKDDLNLSISSTEWLDFVREKPYLK

SEQ ID NO: 52 - protein, 1484 aa, unidentified
  VARIANT 1073: note = Xaa can be any naturally occurring amino acid
  source 1..1484: note = Peregrinibacteria bacterium
MSNFFKNFTNLYELSKTLRFELKPVGDTLTNMKDHLEYDEKLQTFLKDQNIDDAYQALKPQFDEIHEEFITDSLESKKAKEIDFSEYLDLFQEKKELNDSEKKLRNKIGETFNKAGEKWKKEKYPQYEWKKGSKIANGADILSCQDMLQFIKYKNPEDEKIKNYIDDTLKGFFTYFGGFNQNRANYYETKKEASTAVATRIVHENLPKFCDNVIQFKHIIKRKKDGTVEKTERKTEYLNAYQYLKNNNKITQIKDAETEKMIESTPIAEKIFDVYYFSSCLSQKQIEEYNRIIGHYNLLINLYNQAKRSEGKHLSANEKKYKDLPKFKTLYKQIGCGKKKDLFYTIKCDTEEEANKSRNEGKESHSVEEIINKAQEAINKYFKSNNDCENINTVPDFINYILTKENYEGVYWSKAAMNTISDKYFANYHDLQDRLKEAKVFQKADKKSEDDIKIPEAIELSGLFGVLDSLADWQTTLFKSSILSNEKLKIITDSQTPSEALLKMIFNDIEKNMESFLKETNDIITLKKYKGNKEGTEKIKQWFDYTLAINRMLKYFLVKENKIKGNSLDTNISEALKTLIYSDDAEWFKWYDALRNYLTQKPQDEAKENKLKLNFDNPSLAGGWDVNKECSNFCVILKDKNEKKYLAMIKKGENTLFQKEWTEGRGKNLTKKSNPLFEINNCEILSKMEYDFWADVSKMIPKCSTQLKAVVNHFKQSDNEFIFPIGYKVTSGEKFREECKISKQDFELNNKVFNKNELSVTAMRYDLSSTQEKQYIKAFQKEYWELLFKQEKRDTKLTNNEIFNEWINFCNKKYSELLSWERKYKDALTNWINFCKYFLSKYPKTTLFNYSFKESENYNSLDEFYRDVDICSYKLNINTTINKSILDRLVEEGKLYLFEIKNQDSNDGKSIGHKNNLHTIYWNAIFENFDNRPKLNGEAEIFYRKAISKDKLGIVKGKKTKNGTWIIKNYRFSKEKFILHVPITLNFCSNNEYVNDIVNTKFYNFSNLHFLGIDRGEKHLAYYSLVNKNGEIVDQGTLNLPFTDKDGNQRSIKKEKYFYNKQEDKWEAKEVDXWNYNDLLDAMASNRDMARKNWQRIGTIKEAKNGYVSLVIRKIADLAVNNERPAFIVLEDLNTGFKRSRQKIDKSVYQKFELALAKKLNFLVDKNAKRDEIGSPTKALQLTPPVNNYGDIENKKQAGIMLYTRANYTSQTDPATGWRKTIYLKAGPEETTYKKDGKIKNKSVKDQIIETFTDIGFDGKDYYFEYDKGEFVDEKTGEIKPKKWRLYSGENGKSLDRFRGEREKDKYEWKIDKIDIVKILDDLFVNFDKNISLLKQLKEGVELTRNNEHGTGESLRFAINLIQQIRNTGNNERDNDFILSPVRDENGKHFDSREYWDKETKGEKISMPSSGDANGAFNIARKGIIMNAHILANSDSKDLSLFVSDEEWDLHLNNKTEWKKQLNIFSSRKAMAKRKKKRPAATKK

SEQ ID NO: 53 - protein, 1245 aa, Porphyromonas macacae
MKTQHFFEDFTSLYSLSKTIRFELKPIGKTLENIKKNGLIRRDEQRLDDYEKLKKVIDEYHEDFIANILSSFSFSEEILQSYIQNLSISEARAKIEKTMRDTLAKAFSEDERYKSIFKKELVKKDIPVWCPAYKSLCKKFDNFTTSLVPFHENRKNLYTSNEITASIPYRIVHVNLPKFIQNIEALCELQKKMGADLYLEMMENLRNVWPSFVKTPDDLCNLKTYNHLMVQSSISEYNRFVGGYSTEDGTKHQGINEWINIYRQRNKEMRLPGLVFLHKQILAKVDSSSFISDTLENDDQVFCVLRQFRKLFWNTVSSKEDDAASLKDLFCGLSGYDPEAIYVSDAHLATISKNIFDRWNYISDAIRRKTEVLMPRKKESVERYAEKISKQIKKRQSYSLAELDDLLAHYSEESLPAGFSLLSYFTSLGGQKYLVSDGEVILYEEGSNIWDEVLIAFRDLQVILDKDFTEKKLGKDEEAVSVIKKALDSALRLRKFFDLLSGTGAEIRRDSSFYALYTDRMDKLKGLLKMYDKVRNYLTKKPYSIEKFKLHFDNPSLLSGWDKNKELNNLSVIFRQNGYYYLGIMTPKGKNLFKTLPKLGAEEMFYEKMEYKQIAEPMLMLPKVFFPKKTKPAFAPDQSVVDIYNKKTFKTGQKGFNKKDLYRLIDFYKEALTVHEWKLFNFSFSPTEQYRNIGEFFDEVREQAYKVSMVNVPASYIDEAVENGKLYLFQIYNKDFSPYSKGIPNLHTLYWKALFSEQNQSRVYKLCGGGELFYRKASLHMQDTTVHPKGISIHKKNLNKKGETSLFNYDLVKDKRFTEDKFFFHVPISINYKNKKITNVNQMVRDYIAQNDDLQHGIDRGERNLLYISRIDTRGNLLEQFSLNVIESDKGDLRTDYQKILGDREQERLRRRQEWKSIESIKDLKDGYMSQVVHKICNMVVEHKAIVVLENLNLSFMKGRKKVEKSVYEKFERMLVDKLNYLVVDKKNLSNEPGGLYAAYQLTNPLFSFEELHRYPQSGILFFVDPWNTSLTDPSTGFVNLLGRINYTNVGDARKFFDRFNAIRYDGKGNILFDLDLSRFDVRVETQRKLWTLTTFGSRIAKSKKSGKWMVERIENLSLCFLELFEQFNIGYRVEKDLKKAILSQDRKEFYVRLIYLFNLMMQIRNSDGEEDYILSPALNEKNLQFDSRLIEAKDLPVDADANGAYNVARKGLMVVQRIKRGDHESIHRIGRAQWLRYVQEGIVE

SEQ ID NO: 54 - protein, 1250 aa, Smithella sp.
MQTLFENFTNQYPVSKTLRFELIPQGKTKDFIEQKGLLKKDEDRAEKYKKVKNIIDEYHKDFIEKSLNGLKLDGLEKYKTLYLKQEKDDKDKKAFDKEKENLRKQIANAFRNNEKFKTLFAKELIKNDLMSFACEEDKKNVKEFEAFTTYFTGFHQNRANMYVADEKRTAIASRLIHENLPKFIDNIKIFEKMKKEAPELLSPFNQTLKDMKDVIKGTTLEEIFSLDYFNKTLTQSGIDIYNSVIGGRTPEEGKTKIKGLNEYINTDFNQKQTDKKKRQPKFKQLYKQILSDRQSLSFIAEAFKNDTEILEAIEKFYVNELLHFSNEGKSTNVLDAIKNAVSNLESFNLTKMYFRSGASLTDVSRKVFGEWSIINRALDNYYATTYPIKPREKSEKYEERKEKWLKQDFNVSLIQTAIDEYDNETVKGKNSGKVIADYFAKFCDDKETDLIQKVNEGYIAVKDLLNTPCPENEKLGSNKDQVKQIKAFMDSIMDIMHFVRPLSLKDTDKEKDETFYSLFTPLYDHLTQTIALYNKVRNYLTQKPYSTEKIKLNFENSTLLGGWDLNKETDNTAIILRKDNLYYLGIMDKRHNRIFRNVPKADKKDFCYEKMVYKLLPGANKMLPKVFFSQSRIQEFTPSAKLLENYANETHKKGDNFNLNHCHKLIDFFKDSINKHEDWKNFDFRFSATSTYADLSGFYHEVEHQGYKISFQSVADSFIDDLVNEGKLYLFQIYNKDFSPFSKGKPNLHTLYWKMLFDENNLKDVVYKLNGEAEVFYRKKSIAEKNTTIHKANESIINKNPDNPKATSTFNYDIVKDKRYTIDKFQFHIPITMNFKAEGIFNMNQRVNQFLKANPDINIIGIDRGERHLLYYALINQKGKILKQDTLNVIANEKQKVDYHNLLDKKEGDRATARQEWGVIETIKELKEGYLSQVIHKLTDLMIENNAIIVMEDLNFGFKRGRQKVEKQVYQKFEKMLIDKLNYLVDKNKKANELGGLLNAFQLANKFESFQKMGKQNGFIFYVPAWNTSKTDPATGFIDFLKPRYENLNQAKDFFEKFDSIRLNSKADYFEFAFDFKNFTEKADGGRTKWTVCTTNEDRYQWNRALNNNRGSQEKYDITAELKSLFDGKVDYKSGKDLKQQIASQESADFFKALMKNLSITLSLRHNNGEKGDNEQDYILSPVADSKGRFFDSRKADDDMPKNADANGAYHIALKGLWCLEQISKTDDLKKVKLAISNKEWLEFVQTLKG

SEQ ID NO: 55 - protein, 1228 aa, unidentified
  source 1..1228: note = Lachnospiraceae bacterium
MSKLEKFTNCYSLSKTLRFKAIPVGKTQENIDNKRLLVEDEKRAEDYKGVKKLLDRYYLSFINDVLHSIKLKNLNNYISLFRKKTRTEKENKELENLEINLRKEIAKAFKGNEGYKSLFKKDIIETILPEFLDDKDEIALVNSFNGFTTAFTGFFDNRENMFSEEAKSTSIAFRCINENLTRYISNMDIFEKVDAIFDKHEVQEIKEKILNSDYDVEDFFEGEFFNFVLTQEGIDVYNAIIGGFVTESGEKIKGLNEYINLYNQKTKQKLPKFKPLYKQVLSDRESLSFYGEGYTSDEEVLEVFRNTLNKNSEIFSSIKKLEKLFKNFDEYSSAGIFVKNGPAISTISKDIFGEWNVIRDKWNAEYDDIHLKKKAVVTEKYEDDRRKSFKKIGSFSLEQLQEYADADLSVVEKLKEIIIQKVDEIYKVYGSSEKLFDADFVLEKSLKKNDAVVAIMKDLLDSVKSFENYIKAFFGEGKETNRDESFYGDFVLAYDILLKVDHIYDAIRNYVTQKPYSKDKFKLYFQNPQFMGGWDKDKETDYRATILRYGSKYYLAIMDKKYAKCLQKIDKDDVNGNYEKINYKLLPGPNKMLPKVFFSKKWMAYYNPSEDIQKIYKNGTFKKGDMFNLNDCHKLIDFFKDSISRYPKWSNAYDFNFSETEKYKDIAGFYREVEEQGYKVSFESASKKEVDKLVEEGKLYMFQIYNKDFSDKSHGTPNLHTMYFKLLFDENNHGQIRLSGGAELFMRRASLKKEELVVHPANSPIANKNPDNPKKTTTLSYDVYKDKRFSEDQYELHIPIAINKCPKNIFKINTEVRVLLKHDDNPYVIGIDRGERNLLYIVVVDGKGNIVEQYSLNEIINNFNGIRIKTDYHSLLDKKEKERFEARQNWTSIENIKELKAGYISQVVHKICELVEKYDAVIALEDLNSGFKNSRVKVEKQVYQKFEKMLIDKLNYMVDKKSNPCATGGALKGYQITNKFESFKSMSTQNGFIFYIPAWLTSKIDPSTGFVNLLKTKYTSIADSKKFISSFDRIMYVPEEDLFEFALDYKNFSRTDADYIKKWKLYSYGNRIRIFRNPKKNNVFDWEEVCLTSAYKELFNKYGINYQQGDIRALLCEQSDKAFYSSFMALMSLMLQMRNSITGRTDVDFLISPVKNSDGIFYDSRNYEAQENAILPKNADANGAYNIARKVLWAIGQFKKAEDEKLDKVKIAISNKEWLEYAQTSVKH

SEQ ID NO: 56 - protein, 1227 aa, unidentified
  source 1..1227: note = Lachnospiraceae bacterium
SKLEKFTNCYSLSKTLRFKAIPVGKTQENIDNKRLLVEDEKRAEDYKGVKKLLDRYYLSFINDVLHSIKLKNLNNYISLFRKKTRTEKENKELENLEINLRKEIAKAFKGNEGYKSLFKKDIIETILPEFLDDKDEIALVNSFNGFTTAFTGFFDNRENMFSEEAKSTSIAFRCINENLTRYISNMDIFEKVDAIFDKHEVQEIKEKILNSDYDVEDFFEGEFFNFVLTQEGIDVYNAIIGGFVTESGEKIKGLNEYINLYNQKTKQKLPKFKPLYKQVLSDRESLSFYGEGYTSDEEVLEVFRNTLNKNSEIFSSIKKLEKLFKNFDEYSSAGIFVKNGPAISTISKDIFGEWNVIRDKWNAEYDDIHLKKKAVVTEKYEDDRRKSFKKIGSFSLEQLQEYADADLSVVEKLKEIIIQKVDEIYKVYGSSEKLFDADFVLEKSLKKNDAVVAIMKDLLDSVKSFENYIKAFFGEGKETNRDESFYGDFVLAYDILLKVDHIYDAIRNYVTQKPYSKDKFKLYFQNPQFMGGWDKDKETDYRATILRYGSKYYLAIMDKKYAKCLQKIDKDDVNGNYEKINYKLLPGPNKMLPKVFFSKKWMAYYNPSEDIQKIYKNGTFKKGDMFNLNDCHKLIDFFKDSISRYPKWSNAYDFNFSETEKYKDIAGFYREVEEQGYKVSFESASKKEVDKLVEEGKLYMFQIYNKDFSDKSHGTPNLHTMYFKLLFDENNHGQIRLSGGAELFMRRASLKKEELVVHPANSPIANKNPDNPKKTTTLSYDVYKDKRFSEDQYELHIPIAINKCPKNIFKINTEVRVLLKHDDNPYVIGIDRGERNLLYIVVVDGKGNIVEQYSLNEIINNFNGIRIKTDYHSLLDKKEKERFEARQNWTSIENIKELKAGYISQVVHKICELVEKYDAVIALEDLNSGFKNSRVKVEKQVYQKFEKMLIDKLNYMVDKKSNPCATGGALKGYQITNKFESFKSMSTQNGFIFYIPAWLTSKIDPSTGFVNLLKTKYTSIADSKKFISSFDRIMYVPEEDLFEFALDYKNFSRTDADYIKKWKLYSYGNRIRIFRNPKKNNVFDWEEVCLTSAYKELFNKYGINYQQGDIRALLCEQSDKAFYSSFMALMSLMLQMRNSITGRTDVDFLISPVKNSDGIFYDSRNYEAQENAILPKNADANGAYNIARKVLWAIGQFKKAEDEKLDKVKIAISNKEWLEYAQTSVKH

SEQ ID NO: 57 - protein, 1107 aa, Bacillus hisashii
ATRSFILKIEPNEEVKKGLWKTHEVLNHGIAYYMNILKLIRQEAIYEHHEQDPKNPKKVSKAEIQAELWDFVLKMQKCNSFTHEVDKDEVFNILRELYEELVPSSVEKKGEANQLSNKFLYPLVDPNSQSGKGTASSGRKPRWYNLKIAGDPSWEEEKKKWEEDKKKDPLAKILGKLAEYGLIPLFIPYTDSNEPIVKEIKWMEKSRNQSVRRLDKDMFIQALERFLSWESWNLKVKEEYEKVEKEYKTLEERIKEDIQALKALEQYEKERQEQLLRDTLNTNEYRLSKRGLRGWREIIQKWLKMDENEPSEKYLEVFKDYQRKHPREAGDYSVYEFLSKKENHFIWRNHPEYPYLYATFCEIDKKKKDAKQQATFTLADPINHPLWVRFEERSGSNLNKYRILTEQLHTEKLKKKLTVQLDRLIYPTESGGWEEKGKVDIVLLPSRQFYNQIFLDIEEKGKHAFTYKDESIKFPLKGTLGGARVQFDRDHLRRYPHKVESGNVGRIYFNMTVNIEPTESPVSKSLKIHRDDFPKVVNFKPKELTEWIKDSKGKKLKSGIESLEIGLRVMSIDLGQRQAAAASIFEVVDQKPDIEGKLFFPIKGTELYAVHRASFNIKLPGETLVKSREVLRKAREDNLKLMNQKLNFLRNVLHFQQFEDITEREKRVTKWISRQENSDVPLVYQDELIQIRELMYKPYKDWVAFLKQLHKRLEVEIGKEVKHWRKSLSDGRKGLYGISLKNIDEIDRTRKFLLRWSLRPTEPGEVRRLEPGQRFAIDQLNHLNALKEDRLKKMANTIIMHALGYCYDVRKKKWQAKNPACQIILFEDLSNYNPYGERSRFENSRLMKWSRREIPRQVALQGEIYGLQVGEVGAQFSSRFHAKTGSPGIRCRVVTKEKLQDNRFFKNLQREGRLTLDKIAVLKEGDLYPDKGGEKFISLSKDRKCVTTHADINAAQNLQKRFWTRTHGFYKVYCKAYQVDGQTVYIPESKDQKQKIIEEFGEGYFILKDGVYEWVNAGKLKIKKGSSKQSSSELVDSDILKDSFDLASELKGEKLMLYRDPSGNVFPSDKWMAAGVFFGKLERILISKLTNQYSISTIEDDSSKQSM

SEQ ID NO: 58 - protein, 1300 aa, Francisella tularensis
MSIYQEFVNKYSLSKTLRFELIPQGKTLENIKARGLILDDEKRAKDYKKAKQIIDKYHQFFIEEILSSVCISEDLLQNYSDVYFKLKKSDDDNLQKDFKSAKDTIKKQISEYIKDSEKFKNLFNQNLIDAKKGQESDLILWLKQSKDNGIELFKANSDITDIDEALEIIKSFKGWTTYFKGFHENRKNVYSSNDIPTSIIYRIVDDNLPKFLENKAKYESLKDKAPEAINYEQIKKDLAEELTFDIDYKTSEVNQRVFSLDEVFEIANFNNYLNQSGITKFNTIIGGKFVNGENTKRKGINEYINLYSQQINDKTLKKYKMSVLFKQILSDTESKSFVIDKLEDDSDVVTTMQSFYEQIAAFKTVEEKSIKETLSLLFDDLKAQKLDLSKIYFKNDKSLTDLSQQVFDDYSVIGTAVLEYITQQIAPKNLDNPSKKEQELIAKKTEKAKYLSLETIKLALEEFNKHRDIDKQCRFEEILANFAAIPMIFDEIAQNKDNLAQISIKYQNQGKKDLLQASAEDDVKAIKDLLDQTNNLLHKLKIFHISQSEDKANILDKDEHFYLVFEECYFELANIVPLYNKIRNYITQKPYSDEKFKLNFENSTLANGWDKNKEPDNTAILFIKDDKYYLGVMNKKNNKIFDDKAIKENKGEGYKKIVYKLLPGANKMLPKVFFSAKSIKFYNPSEDILRIRNHSTHTKNGSPQKGYEKFEFNIEDCRKFIDFYKQSISKHPEWKDFGFRFSDTQRYNSIDEFYREVENQGYKLTFENISESYIDSVVNQGKLYLFQIYNKDFSAYSKGRPNLHTLYWKALFDERNLQDVVYKLNGEAELFYRKQSIPKKITHPAKEAIANKNKDNPKKESVFEYDLIKDKRFTEDKFFFHCPITINFKSSGANKFNDEINLLLKEKANDVHILSIDRGERHLAYYTLVDGKGNIIKQDTFNIIGNDRMKTNYHDKLAAIEKDRDSARKDWKKINNIKEMKEGYLSQVVHEIAKLVIEYNAIVVFEDLNFGFKRGRFKVEKQVYQKLEKMLIEKLNYLVFKDNEFDKTGGVLRAYQLTAPFETFKKMGKQTGIIYYVPAGFTSKICPVTGFVNQLYPKYESVSKSQEFFSKFDKICYNLDKGYFEFSFDYKNFGDKAAKGKWTIASFGSRLINFRNSDKNHNWDTREVYPTKELEKLLKDYSIEYGHGECIKAAICGESDKKFFAKLTSVLNTILQMRNSKTGTELDYLISPVADVNGNFFDSRQAPKNMPQDADANGAYHIGLKGLMLLGRIKNNQEGKKLNLVIKNEEYFEFVQNRNN

SEQ ID NO: 59 - protein, 1227 aa, synthetic construct
SKLEKFTNCYSLSKTLRFKAIPVGKTQENIDNKRLLVEDEKRAEDYKGVKKLLDRYYLSFINDVLHSIKLKNLNNYISLFRKKTRTEKENKELENLEINLRKEIAKAFKGNEGYKSLFKKDIIETILPEFLDDKDEIALVNSFNGFTTAFTGFFDNRENMFSEEAKSTSIAFRCINENLTRYISNMDIFEKVDAIFDKHEVQEIKEKILNSDYDVEDFFEGEFFNFVLTQEGIDVYNAIIGGFVTESGEKIKGLNEYINLYNQKTKQKLPKFKPLYKQVLSDRESLSFYGEGYTSDEEVLEVFRNTLNKNSEIFSSIKKLEKLFKNFDEYSSAGIFVKNGPAISTISKDIFGEWNVIRDKWNAEYDDIHLKKKAVVTEKYEDDRRKSFKKIGSFSLEQLQEYADADLSVVEKLKEIIIQKVDEIYKVYGSSEKLFDADFVLEKSLKKNDAVVAIMKDLLDSVKSFENYIKAFFGEGKETNRDESFYGDFVLAYDILLKVDHIYDAIRNYVTQKPYSKDKFKLYFQNPQFMGGWDKDKETDYRATILRYGSKYYLAIMDKKYAKCLQKIDKDDVNGNYEKINYKLLPGPNKMLPKVFFSKKWMAYYNPSEDIQKIYKNGTFKKGDMFNLNDCHKLIDFFKDSISRYPKWSNAYDFNFSETEKYKDIAGFYREVEEQGYKVSFESASKKEVDKLVEEGKLYMFQIYNKDFSDKSHGTPNLHTMYFKLLFDENNHGQIRLSGGAELFMRRASLKKEELVVHPANSPIANKNPDNPKKTTTLSYDVYKDKRFSEDQYELHIPIAINKCPKNIFKINTEVRVLLKHDDNPYVIGIARGERNLLYIVVVDGKGNIVEQYSLNEIINNFNGIRIKTDYHSLLDKKEKERFEARQNWTSIENIKELKAGYISQVVHKICELVEKYDAVIALEDLNSGFKNSRVKVEKQVYQKFEKMLIDKLNYMVDKKSNPCATGGALKGYQITNKFESFKSMSTQNGFIFYIPAWLTSKIDPSTGFVNLLKTKYTSIADSKKFISSFDRIMYVPEEDLFEFALDYKNFSRTDADYIKKWKLYSYGNRIRIFRNPKKNNVFDWEEVCLTSAYKELFNKYGINYQQGDIRALLCEQSDKAFYSSFMALMSLMLQMRNSITGRTDVDFLISPVKNSDGIFYDSRNYEAQENAILPKNADANGAYNIARKVLWAIGQFKKAEDEKLDKVKIAISNKEWLEYAQTSVKH

SEQ ID NO: 60 - protein, 1228 aa, synthetic construct
MSKLEKFTNCYSLSKTLRFKAIPVGKTQENIDNKRLLVEDEKRAEDYKGVKKLLDRYYLSFINDVLHSIKLKNLNNYISLFRKKTRTEKENKELENLEINLRKEIAKAFKGNEGYKSLFKKDIIETILPEFLDDKDEIALVNSFNGFTTAFTGFFDNRENMFSEEAKSTSIAFRCINENLTRYISNMDIFEKVDAIFDKHEVQEIKEKILNSDYDVEDFFEGEFFNFVLTQEGIDVYNAIIGGFVTESGEKIKGLNEYINLYNQKTKQKLPKFKPLYKQVLSDRESLSFYGEGYTSDEEVLEVFRNTLNKNSEIFSSIKKLEKLFKNFDEYSSAGIFVKNGPAISTISKDIFGEWNVIRDKWNAEYDDIHLKKKAVVTEKYEDDRRKSFKKIGSFSLEQLQEYADADLSVVEKLKEIIIQKVDEIYKVYGSSEKLFDADFVLEKSLKKNDAVVAIMKDLLDSVKSFENYIKAFFGEGKETNRDESFYGDFVLAYDILLKVDHIYDAIRNYVTQKPYSKDKFKLYFQNPQFMGGWDKDKETDYRATILRYGSKYYLAIMDKKYAKCLQKIDKDDVNGNYEKINYKLLPGPNKMLPKVFFSKKWMAYYNPSEDIQKIYKNGTFKKGDMFNLNDCHKLIDFFKDSISRYPKWSNAYDFNFSETEKYKDIAGFYREVEEQGYKVSFESASKKEVDKLVEEGKLYMFQIYNKDFSDKSHGTPNLHTMYFKLLFDENNHGQIRLSGGAELFMRRASLKKEELVVHPANSPIANKNPDNPKKTTTLSYDVYKDKRFSEDQYELHIPIAINKCPKNIFKINTEVRVLLKHDDNPYVIGIARGERNLLYIVVVDGKGNIVEQYSLNEIINNFNGIRIKTDYHSLLDKKEKERFEARQNWTSIENIKELKAGYISQVVHKICELVEKYDAVIALEDLNSGFKNSRVKVEKQVYQKFEKMLIDKLNYMVDKKSNPCATGGALKGYQITNKFESFKSMSTQNGFIFYIPAWLTSKIDPSTGFVNLLKTKYTSIADSKKFISSFDRIMYVPEEDLFEFALDYKNFSRTDADYIKKWKLYSYGNRIRIFRNPKKNNVFDWEEVCLTSAYKELFNKYGINYQQGDIRALLCEQSDKAFYSSFMALMSLMLQMRNSITGRTDVDFLISPVKNSDGIFYDSRNYEAQENAILPKNADANGAYNIARKVLWAIGQFKKAEDEKLDKVKIAISNKEWLEYAQTSVKH

SEQ ID NO: 61 - protein, 1228 aa, synthetic construct
MSKLEKFTNCYSLSKTLRFKAIPVGKTQENIDNKRLLVEDEKRAEDYKGVKKLLDRYYLSFINDVLHSIKLKNLNNYISLFRKKTRTEKENKELENLEINLRKEIAKAFKGNEGYKSLFKKDIIETILPEFLDDKDEIALVNSFNGFTTAFTGFFDNRENMFSEEAKSTSIAFRCINENLTRYISNMDIFEKVDAIFDKHEVQEIKEKILNSDYDVEDFFEGEFFNFVLTQEGIDVYNAIIGGFVTESGEKIKGLNEYINLYNQKTKQKLPKFKPLYKQVLSDRESLSFYGEGYTSDEEVLEVFRNTLNKNSEIFSSIKKLEKLFKNFDEYSSAGIFVKNGPAISTISKDIFGEWNVIRDKWNAEYDDIHLKKKAVVTEKYEDDRRKSFKKIGSFSLEQLQEYADADLSVVEKLKEIIIQKVDEIYKVYGSSEKLFDADFVLEKSLKKNDAVVAIMKDLLDSVKSFENYIKAFFGEGKETNRDESFYGDFVLAYDILLKVDHIYDAIRNYVTQKPYSKDKFKLYFQNPQFMGGWDKDKETDYRATILRYGSKYYLAIMDKKYAKCLQKIDKDDVNGNYEKINYKLLPGPNKMLPKVFFSKKWMAYYNPSEDIQKIYKNGTFKKGDMFNLNDCHKLIDFFKDSISRYPKWSNAYDFNFSETEKYKDIAGFYREVEEQGYKVSFESASKKEVDKLVEEGKLYMFQIYNKDFSDKSHGTPNLHTMYFKLLFDENNHGQIRLSGGAELFMRRASLKKEELVVAPANSPIANKNPDNPKKTTTLSYDVYKDKRFSEDQYELHIPIAINKCPKNIFKINTEVRVLLKHDDNPYVIGIDRGERNLLYIVVVDGKGNIVEQYSLNEIINNFNGIRIKTDYHSLLDKKEKERFEARQNWTSIENIKELKAGYISQVVHKICELVEKYDAVIALEDLNSGFKNSRVKVEKQVYQKFEKMLIDKLNYMVDKKSNPCATGGALKGYQITNKFESFKSMSTQNGFIFYIPAWLTSKIDPSTGFVNLLKTKYTSIADSKKFISSFDRIMYVPEEDLFEFALDYKNFSRTDADYIKKWKLYSYGNRIRIFRNPKKNNVFDWEEVCLTSAYKELFNKYGINYQQGDIRALLCEQSDKAFYSSFMALMSLMLQMRNSITGRTDVDFLISPVKNSDGIFYDSRNYEAQENAILPKNADANGAYNIARKVLWAIGQFKKAEDEKLDKVKIAISNKEWLEYAQTSVKH

SEQ ID NO: 62 - protein, 1227 aa, synthetic construct; identical to SEQ ID NO: 59

SEQ ID NO: 63 - protein, 1228 aa, synthetic construct
MSKLEKFTNCYSLSKTLRFKAIPVGKTQENIDNKRLLVEDEKRAEDYKGVKKLLDRYYLSFINDVLHSIKLKNLNNYISLFRKKTRTEKENKELENLEINLRKEIAKAFKGNEGYKSLFKKDIIETILPEFLDDKDEIALVNSFNGFTTAFTGFFDNRENMFSEEAKSTSIAFRCINENLTRYISNMDIFEKVDAIFDKHEVQEIKEKILNSDYDVEDFFEGEFFNFVLTQEGIDVYNAIIGGFVTESGEKIKGLNEYINLYNQKTKQKLPKFKPLYKQVLSDRESLSFYGEGYTSDEEVLEVFRNTLNKNSEIFSSIKKLEKLFKNFDEYSSAGIFVKNGPAISTISKDIFGEWNVIRDKWNAEYDDIHLKKKAVVTEKYEDDRRKSFKKIGSFSLEQLQEYADADLSVVEKLKEIIIQKVDEIYKVYGSSEKLFDADFVLEKSLKKNDAVVAIMKDLLDSVKSFENYIKAFFGEGKETNRDESFYGDFVLAYDILLKVDHIYDAIRNYVTQKPYSKDKFKLYFQNPQFMGGWDKDKETDYRATILRYGSKYYLAIMDKKYAKCLQKIDKDDVNGNYEKINYKLLPGPNKMLPKVFFSKKWMAYYNPSEDIQKIYKNGTFKKGDMFNLNDCHKLIDFFKDSISRYPKWSNAYDFNFSETEKYKDIAGFYREVEEQGYKVSFESASKKEVDKLVEEGKLYMFQIYNKDFSDKSHGTPNLHTMYFKLLFDENNHGQIRLSGGAELFMRRASLKKEELVVHPANSPIANKNPDNPKKTTTLSYDVYKDKRFSEDQYELHIPIAINKCPKNIFKINTEVRVLLKHDDNPYVIGIDRGERNLLYIVVVDGKGNIVEQYSLNEIINNFNGIRIKTDYHSLLDKKEKERFEARQNWTSIENIKELKAGYISQVVHKICELVEKYDAVIALEDLNSGFKNSRVKVEKQVYQKFEKMLIDKLNYMVDKKSNPCATGGALKGYQITNKFESFKSMSTQNGFIFYIPAWLTSKIDPSTGFVNLLKTKYTSIADSKKFISSFDRIMYVPEEDLFEFALDYKNFSRTDADYIKKWKLYSYGNRIRIFRNPKKNNVFDWEEVCLTSAYKELFNKYGINYQQGDIRALLCEQSDKAFYSSFMALMSLMLQMANSITGRTDVDFLISPVKNSDGIFYDSRNYEAQENAILPKNADANGAYNIARKVLWAIGQFKKAEDEKLDKVKIAISNKEWLEYAQTSVKH

SEQ ID NO: 64 - protein, 1307 aa, synthetic construct
MTQFEGFTNLYQVSKTLRFELIPQGKTLKHIQEQGFIEEDKARNDHYKELKPIIDRIYKTYADQCLQLVQLDWENLSAAIDSYRKEKTEETRNALIEEQATYRNAIHDYFIGRTDNLTDAINKRHAEIYKGLFKAELFNGKVLKQLGTVTTTEHENALLRSFDKFTTYFSGFYRNRKNVFSAEDISTAIPHRIVQDNFPKFKENCHIFTRLITAVPSLREHFENVKKAIGIFVSTSIEEVFSFPFYNQLLTQTQIDLYNQLLGGISREAGTEKIKGLNEVLNLAIQKNDETAHIIASLPHRFIPLFKQILSDRNTLSFILEEFKSDEEVIQSFCKYKTLLRNENVLETAEALFNELNSIDLTHIFISHKKLETISSALCDHWDTLRNALYERRISELTGKITKSAKEKVQRSLKHEDINLQEIISAAGKELSEAFKQKTSEILSHAHAALDQPLPTTLKKQEEKEILKSQLDSLLGLYHLLDWFAVDESNEVDPEFSARLTGIKLEMEPSLSFYNKARNYATKKPYSVEKFKLNFQMPTLARGWDVNREKNNGAILFVKNGLYYLGIMPKQKGRYKALSFEPTEKTSEGFDKMYYDYFPDAAKMIPKCSTQLKAVTAHFQTHTTPILLSNNFIEPLEITKEIYDLNNPEKEPKKFQTAYAKKTGDQKGYREALCKWIDFTRDFLSKYTKTTSIDLSSLRPSSQYKDLGEYYAELNPLLYHISFQRIAEKEIMDAVETGKLYLFQIYNKDFAKGHHGKPNLHTLYWTGLFSPENLAKTSIKLNGQAELFYRPKSRMKRMAARLGEKMLNKKLKDQKTPIPDTLYQELYDYVNHRLSHDLSDEARALLPNVITKEVSHEIIKDRRFTSDKFFFHVPITLNYQAANSPSKFNQRVNAYLKEHPETPIIGIDRGERNLIYITVIDSTGKILEQRSLNTIQQFDYQKKLDNREKERVAARQAWSVVGTIKDLKQGYLSQVIHEIVDLMIHYQAVVVLENLNFGFKSKRTGIAEKAVYQQFEKMLIDKLNCLVLKDYPAEKVGGVLNPYQLTDQFTSFAKMGTQSGFLFYVPAPYTSKIDPLTGFVDPFVWKTIKNHESRKHFLEGFDFLHYDVKTGDFILHFKMNRNLSFQRGLPGFMPAWDIVFEKNETQFDAKGTPFIAGKRIVPVIENHRFTGRYRDLYPANELIALLEEKGIVFRDGSNILPKLLENDDSHAIDTMVALIRSVLQMRNSNAATGEDYINSPVRDLNGVCFDSRFQNPEWPMDADANGAYHIALKGQLLLNHLKESKDLKLQNGISNQDWLAYIQELRN

SEQ ID NO: 65 - protein, 1307 aa, synthetic construct
MTQFEGFTNLYQVSKTLRFELIPQGKTLKHIQEQGFIEEDKARNDHYKELKPIIDRIYKTYADQCLQLVQLDWENLSAAIDSYRKEKTEETRNALIEEQATYRNAIHDYFIGRTDNLTDAINKRHAEIYKGLFKAELFNGKVLKQLGTVTTTEHENALLRSFDKFTTYFSGFYRNRKNVFSAEDISTAIPHRIVQDNFPKFKENCHIFTRLITAVPSLREHFENVKKAIGIFVSTSIEEVFSFPFYNQLLTQTQIDLYNQLLGGISREAGTEKIKGLNEVLNLAIQKNDETAHIIASLPHRFIPLFKQILSDRNTLSFILEEFKSDEEVIQSFCKYKTLLRNENVLETAEALFNELNSIDLTHIFISHKKLETISSALCDHWDTLRNALYERRISELTGKITKSAKEKVQRSLKHEDINLQEIISAAGKELSEAFKQKTSEILSHAHAALDQPLPTTLKKQEEKEILKSQLDSLLGLYHLLDWFAVDESNEVDPEFSARLTGIKLEMEPSLSFYNKARNYATKKPYSVEKFKLNFQMPTLARGWDVNREKNNGAILFVKNGLYYLGIMPKQKGRYKALSFEPTEKTSEGFDKMYYDYFPDAAKMIPKCSTQLKAVTAHFQTHTTPILLSNNFIEPLEITKEIYDLNNPEKEPKKFQTAYAKKTGDQKGYREALCKWIDFTRDFLSKYTKTTSIDLSSLRPSSQYKDLGEYYAELNPLLYHISFQRIAEKEIMDAVETGKLYLFQIYNKDFAKGHHGKPNLHTLYWTGLFSPENLAKTSIKLNGQAELFYRPKSRMKRMAHRLGEKMLNKKLKDQKTPIPDTLYQELYDYVNHRLSHDLSDEARALLPNVITKEVSHEIIKDRRFTSDKFFFHVPITLNYQAANSPSKFNQRVNAYLKEHPETPIIGIDRGERNLIYITVIDSTGKILEQRSLNTIQQFDYQKKLDNREKERVAARQAWSVVGTIKDLKQGYLSQVIHEIVDLMIHYQAVVVLENLNFGFKSKRTGIAEKAVYQQFEKMLIDKLNCLVLKDYPAEKVGGVLNPYQLTDQFTSFAKMGTQSGFLFYVPAPYTSKIDPLTGFVDPFVWKTIKNHESRKHFLEGFDFLHYDVKTGDFILHFKMNRNLSFQRGLPGFMPAWDIVFEKNETQFDAKGTPFIAGKRIVPVIENHRFTGRYRDLYPANELIALLEEKGIVFRDGSNILPKLLENDDSHAIDTMVALIRSVLQMRNSNAATGEDYINSPVRDLNGVCFDSRFQNPEWPMDADANGAYHIALKGQLLLNHLKESKDLKLQNGISNQDWLAYIQELRN

SEQ ID NO: 66 - DNA, 3987 bp, synthetic construct
  source 1..3987: mol_type = other DNA
atggccgggagcaagaagcgccggataaagcaggacacgcagttcgagggcttcaccaacctgtaccaagtctccaagacgctccggttcgagcttatcccgcaagggaagaccctgaaacacatccaggaacaaggtttcatcgaggaggacaaggcccgcaacgaccactacaaggagctcaagcccataatcgatcggatctacaagacgtacgccgaccagtgcctccaactggtgcagctcgactgggagaacctgagcgccgccattgacagctaccgcaaggaaaagacggaggagacgcgcaacgcccttattgaggagcaagccacctaccgcaacgccatccacgactacttcatcgggcgcaccgacaacctgacggacgcgatcaacaagcgccacgcggaaatctacaagggccttttcaaggccgagctcttcaacgggaaggtcctaaaacagctcgggactgtcacgacaaccgagcatgagaacgccctccttcgcagcttcgacaagttcaccacatacttctcgggcttctaccggaaccgcaagaacgttttcagcgccgaggacatctccaccgccatcccgcacaggatcgtccaggacaacttccccaagttcaaggagaactgccacatcttcacgcgcctgattacagccgtaccttcacttcgtgagcacttcgagaacgtcaaaaaggccatcgggatcttcgtctccacgtccatcgaggaggtattctctttcccgttctataaccagctcctgacccagacgcagatcgacctctacaaccagctactgggcggcatcagccgggaggccgggaccgagaaaataaagggcctcaacgaagttctcaacctggccatccagaagaacgacgagaccgcgcatatcatcgcatccctgccgcatcgcttcattcctttgttcaagcagatattgagcgaccggaacaccctctcgttcatcctcgaagaattcaagagcgacgaggaggtcattcagtctttctgcaagtacaagacgctcctacggaatgagaatgtgctggagaccgcggaggcactcttcaatgagctgaactccattgacctgacccacatcttcattagccacaagaaactggagacgatctccagcgccctgtgcgaccactgggacactctccgcaacgccctctacgaacgccggatctccgaacttaccggcaagataactaagtcggctaaggagaaggtgcaacggagcctcaagcacgaggacatcaaccttcaggaaatcatctcagccgcgggcaaggagctgagcgaggcgtttaagcagaaaacatcggagatactgagccacgcgcacgcggccctggatcaaccgctgccgacgactctcaagaagcaagaggagaaggaaatccttaagtcccagctcgactcgctgctcggcctctatcacttgctcgactggttcgcggttgatgagtccaacgaggtggacccggagttctccgcgcgcctcacgggtattaagctggagatggagccaagcttaagcttctacaacaaggcccgcaactacgcgaccaaaaaaccgtactcagtcgagaaattcaagctgaatttccagatgcctacattggcgagggggtgggacgtgaaccgcgagaagaacaatggagccatcctgttcgtcaaaaatgggttgtactacctgggcatcatgcccaagcagaagggccgttacaaggccctgtcattcgagcctaccgagaagacctcggagggcttcgacaagatgtactacgactatttcccggacgccgccaagatgatcccgaagtgctccacgcagctcaaagccgtcacggcccacttccagacgcataccacgccgatacttctgagcaacaacttcattgagccgctagagatcacgaaggagatatacgacctaaacaaccccgaaaaggagcccaagaagttccagacagcctacgctaagaagacaggtgatcagaagggatatagggaggcactctgcaagtggatcgacttcacgcgcgacttcctgtcgaaatatacaaagacgaccagcattgacctaagttctctccgcccatcctcccagtacaaggatctgggcgagtattatgcggagctgaacccattgctgtaccacatcagcttccagaggatcgccgagaaggagattatggacgcggtggagacggggaaactatacctgttccaaatatataacaaggacttcgctaaagggcaccacgggaagcccaacctgcacacactctactggacgggcttgttttcgccagaaaatttggccaagacttcgatcaagctcaacggccaggcggagttgttttaccgtcccaagtctcgcatgaagcgcatggcgcatcgcctcggagagaaaatgcttaacaagaagctcaaggatcagaagacgcccatacctgatacgttgtaccaggaattgtacgactacgtgaaccaccgcctatcgcacgacctctcagacgaggcccgcgccctcctcccaaacgtgattactaaggaggtttcccatgaaataatcaaggaccgacggttcaccagcgacaaattttttttccacgtgcctatcacgctcaattaccaggcggccaactccccatcgaagttcaaccagcgcgtgaacgcctaccttaaggagcacccggagaccccaatcatcgggatcgaccgtggcgagcggaacctgatctatattacggtgatcgatagcaccgggaagatcctggagcagcgctccctgaacacaatccagcagtttgactaccagaagaaactcgacaaccgggagaaggagcgcgtcgcagcccggcaagcatggagtgtggtcggcaccataaaggacctgaaacagggttacctaagtcaagttatccacgagatcgttgacctgatgatacactatcaagccgtagtcgtgctggagaacctcaacttcgggtttaagtccaagcgcaccggcatcgcggagaaggcggtgtaccagcagttcgagaagatgctgatcgacaagctgaactgcctggtgctcaaggactaccctgcggagaaggtcggcggggtcttgaacccgtaccagctaaccgaccagttcacgagcttcgccaaaatgggcacgcagtccggattcttgttttatgtcccggctccatatacaagtaagatcgacccgctgacagggtttgttgacccattcgtgtggaagaccatcaagaaccacgagagcaggaaacacttcttagagggcttcgacttcctgcattacgacgttaagacaggcgacttcatcctgcacttcaagatgaaccgcaacctgtcgttccagaggggcctgcccggcttcatgcccgcctgggatatcgtctttgagaagaatgagacgcagttcgacgcgaaggggacgccgttcatcgctggaaagcggatcgtgccggtcatcgagaaccaccgcttcacgggtcgctaccgagatttataccccgccaacgaactaattgcgctgctggaggagaaggggatcgtgttccgagatggcagcaacattctcccgaagctgctggagaacgacgactcgcacgctattgacacgatggtcgccctcatacggagcgtgcttcagatgcggaacagtaacgctgccacgggcgaggactacattaactcccccgtccgcgacctcaacggggtctgcttcgatagccgcttccagaacccggagtggcctatggatgcggacgcgaacggggcctaccacatcgccctcaagggccaactcctgctcaaccacttgaaggaaagcaaagacctcaaattgcagaatggcatcagtaaccaggactggctcgcgtacatccaggaactgagaaacgggtccaagaagcggcgtatcaagcaagattga

SEQ ID NO: 67 - DNA, 3987 bp, synthetic construct
  source 1..3987: mol_type = other DNA
atggcgggaagcaaaaagcgccggattaagcaagacacgcagttcgagggcttcacgaacctctaccaagtcagcaagaccctccggttcgagctgataccacagggaaagacgctcaagcacatccaggaacagggcttcatcgaggaggacaaggcgcgcaacgaccactacaaggagttgaaaccgatcatcgaccgcatctacaagacgtacgccgaccagtgcctccagctcgtgcagctcgactgggagaacctctccgccgccattgactcgtaccggaaggagaagactgaggagacccgcaacgccctgatcgaggagcaagcaacctaccggaacgccatccacgactacttcatcggccgcaccgacaacctcaccgacgcgatcaacaagcggcacgcggagatatacaaagggctgttcaaggcggagctgttcaacggcaaggtgctcaagcagctagggacggtgaccacgaccgagcacgagaacgcgctcctccgcagcttcgacaagttcaccacctacttcagcggcttctaccggaaccgcaagaatgtgttcagcgcggaggacatcagcacggccatcccgcaccgcatcgtccaggacaacttcccgaagttcaaggagaactgccacatcttcacccgcctgataaccgccgtcccctccctgcgggagcacttcgagaacgtcaaaaaggcaattgggatcttcgtctcgaccagcattgaggaggtgttcagcttccccttctacaaccagctcctcacccagacgcagatcgacctgtacaatcagttgctcggcgggataagccgcgaggcgggaaccgaaaaaatcaaggggctgaacgaagtgttgaacctcgccatccagaagaacgacgagaccgcgcacatcatcgcctccctgccccaccggttcatcccgctgttcaagcagatcctctctgaccggaacaccctgtccttcattcttgaggagttcaagtcggacgaggaggtcatccagagcttctgcaagtacaagacgctgctacggaacgagaacgtgctggagacggcggaggcactgttcaacgagctaaacagcatcgacctcacgcacatcttcatcagtcacaagaaactggagaccatctcctccgcgctgtgcgaccactgggacacgctcaggaacgcgctctacgagcgccgaatcagtgagctgacgggcaagatcacgaagtccgcgaaggagaaggtgcagcggtccctcaagcacgaggacatcaacctccaggagatcatctcagcggctgggaaagagctgtccgaggcgttcaagcagaaaacgagcgaaatcctgtcccacgcgcacgcggccctggatcagcctctgccgacgaccctcaagaaacaagaagaaaaggaaatcctcaagtcgcagctcgactcgctgctgggcctgtaccatctcctcgactggttcgccgtggacgagagcaacgaggtggaccccgagttctccgcgcggcttacggggatcaagctggagatggagcccagcctgtccttctacaacaaggcgcgcaactacgccaccaagaagccctacagcgtggagaagttcaagctcaacttccagatgcccactctcgcacgtgggtgggacgtcaaccgcgaaaaaaataatggggcgatcctgttcgtcaagaacggcctgtactacttgggcatcatgccgaaacagaagggccgctacaaggccctgagcttcgaaccgaccgagaaaacgagcgaggggttcgacaagatgtactacgactacttccccgacgccgcgaagatgattccaaagtgctccacgcagcttaaggccgtgacggcccacttccagacgcacacgaccccgatcctcctcagcaacaacttcatcgagcccctggagatcacgaaggagatatacgacctgaacaacccggagaaggagcccaagaaattccagaccgcctacgccaagaagacaggcgaccaaaagggttacagggaggccctctgcaagtggatcgacttcactagggacttcctgtccaagtacaccaagactacctctatcgacctgtccagcctccgcccgtcgtcccagtacaaagatttgggcgagtattacgcggagctgaacccactgctctaccacatcagcttccagcgcatcgcggagaaggagatcatggacgcagtggagacgggcaagctatacctatttcagatatacaacaaagacttcgctaagggacaccacggcaagcctaacctgcacaccctctactggacggggctcttcagcccggagaacctcgccaagacctcgatcaagctcaacggccaggccgagctgttctaccggcccaagtcccgcatgaagcggatggcccaccggctcggggagaaaatgctcaacaagaaattgaaggaccaaaaaacgccgatacccgacaccctataccaggagctgtacgactatgtgaaccaccgcctgagccacgacctcagcgacgaggcgcgggccctcctgccgaacgtcatcacaaaggaggtcagccacgagatcatcaaggaccggcgcttcacctccgacaagtttttctttcacgtgcccatcacgctcaactaccaggccgccaactcgccgtccaagttcaaccagcgcgtgaacgcctacctcaaggagcaccccgagaccccgatcatcgggattgaccgaggggagcggaacctcatctacatcaccgtcatcgacagcaccgggaagatccttgaacagcggtcgctcaacaccatccagcagttcgactaccagaagaaactcgacaaccgggagaaggagagagtggcggcccgccaggcttggtccgtcgtcgggacgattaaggacttgaaacaaggttacctgtcgcaagtgatccacgagatcgttgacctgatgatccactaccaagccgtcgtggtcctggagaacctcaacttcggcttcaagagcaaacgaaccggcatcgcggagaaggccgtgtaccagcagttcgaaaaaatgctgatcgacaagctgaactgcctcgtgctcaaggactaccccgctgagaaggtcggcggggtgctgaacccgtaccagctcactgaccagttcaccagcttcgcaaagatgggcacccagtccggcttcctgttctacgtgcctgcgccatacacctcgaagatcgacccgctcaccgggttcgtggaccccttcgtctggaagaccatcaagaaccacgagagccgcaagcacttcctggagggcttcgacttcctccactacgacgtcaagaccggggacttcatcctgcacttcaagatgaaccgcaacctcagtttccagcgcggcctgccggggttcatgcccgcttgggatatagtcttcgagaagaatgagacgcagttcgacgcgaagggcaccccgttcatcgccgggaagcgcatcgtgccggtcatcgagaaccaccggttcaccgggcgctaccgcgacctatacccggcgaacgagttgatcgccctcctggaggagaagggcatcgtgttccgcgacggctccaacatcctcccgaagctgctcgaaaacgacgactcccacgccatcgacacgatggtcgcgctgatccggtcggtgctccagatgcggaactccaacgccgcgacgggcgaggactacatcaacagtccggtccgcgatctgaacggcgtctgcttcgactcccggttccagaaccccgagtggccgatggacgcggacgcgaacggcgcataccacatcgccctaaaagggcaattgctgctcaaccacctcaaggaatccaaagacctaaagctccagaacggcatctccaaccaggactggctggcgtacatccaggaactgcggaacgggagcaaaaaacgtcggatcaagcaagattga

SEQ ID NO: 68 - DNA, 3987 bp, synthetic construct
  source 1..3987: mol_type = other DNA
atggcgggctccaagaaacgccggattaagcaagatacccagttcgaggggttcacgaacctctaccaagtgagcaagaccctccgattcgaactgattcctcaggggaagaccctcaagcacatccaggagcaagggttcatcgaggaggacaaggcgcggaacgaccactacaaggaactcaaacccatcatcgaccgcatctacaagacctacgccgatcagtgcctccagctcgtgcagttggactgggagaacctcagcgcggccattgactcctaccggaaggagaaaacggaggagacgcgcaacgcgctcatcgaggaacaggcaacctatcgcaacgccatccacgactacttcatcgggaggactgacaacctcactgacgcgattaacaagcgccacgcggagatatacaagggactcttcaaagcggagctgtttaacggcaaggttctcaagcaactcggcactgtgaccacgaccgagcatgagaacgccctgctccgctccttcgacaagttcaccacctacttctccgggttctaccgcaaccgcaagaatgtcttcagcgcggaggacatcagcacggccattccacatcgaatcgtccaagataacttcccgaagttcaaggagaactgccacatcttcacccgactcattactgctgtaccgtcgttacgcgaacacttcgagaacgtcaagaaggcaattggaatcttcgtctctacgtcaatagaggaggtgttcagcttccctttctacaaccagctccttacgcagacccagatagacctgtacaatcagctcctcggtgggatcagccgggaggcggggactgagaagattaaagggctcaacgaggtcttgaacctggccatccaaaaaaacgatgagacggcgcacatcatcgcctcgctgccccaccggttcatcccgctgttcaagcagatcctcagtgacaggaacaccttgagctttatcctagaggagttcaagagcgacgaggaggtgatccagagcttctgcaagtacaaaaccctgctgaggaacgagaacgtcctggagacggcggaggcgctgttcaacgagctgaactctatcgacttaactcacatattcatctcgcacaagaagctggagactattagctctgcactctgcgaccactgggacaccctccgcaacgcgctctacgagcgccgcatctcggagctgaccgggaagatcaccaaatccgcgaaggaaaaggtccagcgttccctcaaacacgaggatattaacttacaggagattatctcagcggctgggaaggagttgtcagaggcgttcaagcagaaaacttccgagatcctgagccacgcgcacgcagcgctcgaccagcctctgcccaccaccctcaaaaagcaggaagaaaaagagatcctcaagagccagttggactccctgctggggctctatcaccttctcgactggttcgccgtcgatgagtcgaacgaggtggaccccgagttctccgcccggctgaccggcatcaagctagagatggagccgtccctcagcttctacaataaggcccgcaactacgcgaccaaaaaaccctacagcgtggagaagttcaagctgaacttccagatgccgaccttagcacgcggttgggacgtaaacagggagaagaacaatggagccatcctgttcgtcaagaacgggctttactacctcgggataatgcccaagcagaagggccgctacaaggccctttccttcgagccgacggagaaaacctccgaggggttcgacaagatgtactacgactacttccccgacgccgccaagatgatcccgaagtgctcaacgcagctaaaagccgtgaccgcccacttccagacccacacgacgccgatcctgctgagcaacaacttcatcgagccccttgagatcactaaggagatatacgacctgaacaaccccgagaaggagcccaagaagtttcaaaccgcctacgccaaaaaaactggcgaccaaaagggctacagggaggcgctgtgtaagtggatcgacttcacacgcgacttcctttcgaagtatacgaagacaacctctattgacctgagcagcctgcgtcctagctcccagtacaaagatttgggcgagtactacgcggagcttaatccactactctaccacatctcattccagcgcatcgctgagaaggaaatcatggacgcggtggagacaggcaaactgtacctcttccagatatacaacaaagacttcgctaaggggcaccacgggaagcccaaccttcatacgctctactggacgggcctattcagccccgaaaatctggccaagacctccatcaagctgaacggccaagcggagctgttctacagacccaagagccggatgaagcggatggcccacaggctcggcgagaaaatgcttaacaaaaagttgaaggaccagaaaacccctatccccgacaccctctaccaggaactgtacgactacgtgaaccacaggctctcgcacgacctttccgacgaggcccgtgccctactcccgaacgtcattaccaaagaggtttcgcacgagatcatcaaggaccggcggttcacgagcgacaagtttttctttcacgtccccatcacccttaactaccaggcggccaactccccatccaagttcaaccagcgtgtgaatgcctacctcaaggagcacccagagaccccgatcattgggatcgaccggggcgagcggaacctgatctacatcaccgtcatcgactcgacgggcaagattcttgagcagagatcgttgaataccatacagcagttcgactaccagaagaaactcgacaaccgcgagaaggagcgcgtggcggcccgccaggcgtggtccgtcgttgggacgattaaggacttgaaacaaggttatctgtcccaagtcatccacgagatcgttgatctgatgatccactatcaggcagtggtggtgctggagaatctcaacttcggcttcaagagtaagcggacgggaatcgccgagaaggccgtgtaccagcagttcgagaagatgctgatcgacaagctcaactgccttgtgctgaaagactacccggccgagaaggtcggcggcgtcctcaacccgtaccaacttaccgaccagttcacctccttcgccaagatgggcactcagtccgggttcttgttctacgtccccgcaccttacacctctaagatcgaccctctgactggcttcgtagatccattcgtgtggaagaccattaagaaccacgagagccgcaagcacttcctggagggcttcgacttcctgcactacgacgtgaagaccggggacttcatccttcacttcaagatgaaccggaacctcagcttccagcggggcctgccggggttcatgcccgcctgggacatcgtgttcgagaagaacgagacccagttcgacgcgaagggcacgcccttcatcgccgggaagcgtatcgtgccggtgatcgagaaccatcgtttcacgggtcgctaccgtgacctctacccggcgaacgagcttatcgcactcctggaggagaagggcatcgtcttccgggacggctccaacatcctcccgaaactgctggaaaacgacgactctcacgccatcgacacgatggtggccctcatccggtccgtgctccaaatgcggaacagcaacgccgccaccggtgaggactacatcaacagcccggtccgggatctgaacggggtgtgcttcgattcgcggttccagaatcctgagtggccgatggacgcggatgcaaacggggcgtaccacatcgcgctcaagggccagttacttctgaaccaccttaaggagtctaaagatttgaaactccagaacgggatctcgaaccaggactggctggcctacatccaagagttgcggaacggcagcaagaagcggcggattaagcaagattag

SEQ ID NO: 69 - DNA, 3681 bp, unidentified
  source 1..3681: mol_type = genomic DNA; note = Lachnospiraceae bacterium
tccaagctggagaagtttacaaactgttacagcctctccaaaaccctcaggtttaaagcgatcccggtgggcaagacccaggagaacatcgacaacaagaggctcctggtggaagacgagaagcgcgccgaagactacaagggcgtgaagaagctgctcgataggtactacctcagctttattaacgacgtgctgcacagcatcaaactcaagaatctcaacaactacatctccctcttccgcaaaaagacccgcaccgagaaggagaacaaggagctggagaacctggagatcaacctccgcaaggaaatcgccaaagcgttcaagggcaatgaagggtacaagagcctcttcaagaaagacatcatcgaaactatcctcccagagtttctcgatgacaaggacgagatcgcgctggtgaactcctttaacgggttcacaaccgcgtttaccggcttctttgataacagggaaaatatgttctccgaggaggccaagtccaccagcatcgccttcaggtgtatcaacgagaacctcacccgctacatttccaatatggacattttcgagaaggtggatgcgatcttcgataagcacgaggtgcaggagatcaaagagaagattctcaattccgattatgacgtcgaggatttcttcgaaggggagttctttaattttgtgctcacacaagagggcattgacgtgtacaacgcgattatcgggggcttcgtcacagagtccggggagaagattaaggggctgaatgagtacatcaatctgtacaatcagaagaccaagcagaaactgccgaaattcaagccgctctacaagcaagtcctgtccgatagggaaagcctctccttctacggcgagggctataccagcgacgaggaggtgctggaagtcttccgcaacacactgaataagaatagcgagattttctcctccatcaagaagctcgagaagctctttaagaactttgacgagtacagctccgccgggattttcgtgaagaacgggccggcgatcagcaccatctccaaggacatctttggcgagtggaacgtcatcagggacaagtggaacgccgagtacgacgacatccacctgaagaagaaggcggtggtgaccgagaagtatgaggacgatcgcaggaagtccttcaaaaaaatcggctccttcagcctcgaacagctccaggagtatgccgatgcggatctgtccgtcgtcgagaagctgaaggaaatcatcattcagaaggtcgacgagatctataaagtgtacgggtccagcgagaagctgttcgacgccgactttgtgctcgagaagtccctcaaaaagaatgacgccgtggtggccattatgaaagacctgctcgactccgtgaagtccttcgaaaattacattaaagcgttctttggggaggggaaggaaactaacagggatgagtccttctatggcgactttgtcctcgcgtacgacatcctgctgaaggtcgaccacatttacgacgcgatccgcaactacgtgacacagaagccgtactccaaagacaagttcaagctgtacttccagaacccgcaatttatggggggctgggacaaggataaagagacagactaccgcgcgacaattctccgctatggctccaaatactatctggccatcatggacaagaagtacgcgaagtgcctgcagaagatcgacaaagacgacgtcaatggcaactatgaaaagatcaactacaagctgctgccgggcccgaacaagatgctcccgaaggtgttcttcagcaagaagtggatggcctactacaatccaagcgaggatattcagaaaatctataaaaacgggaccttcaagaagggggacatgtttaacctcaacgactgccacaagctcattgatttcttcaaggatagcatttcccgctacccgaaatggtccaatgcgtacgattttaacttctccgagacagaaaagtacaaagacatcgcgggcttttacagggaggtggaggagcaagggtataaagtttcttttgaatccgcgagcaagaaggaagtcgacaagctcgtcgaggagggcaagctctacatgttccaaatttataacaaggacttttccgacaagagccatgggaccccaaacctccacaccatgtacttcaaactgctctttgacgagaacaaccacgggcaaatcaggctgagcggcggcgccgaattattcatgcgcagggcctccctcaagaaggaagagctggtcgtccatccagccaattccccgatcgcgaacaagaacccggacaatccgaaaaagaccaccaccctgtcctacgacgtctacaaggacaaacgcttcagcgaagaccagtacgaattacacatcccaattgcgattaataagtgcccaaagaatatcttcaaaattaatacagaggtcagggtgctgctcaaacacgacgacaatccgtatgtcatcggcattgacaggggcgagcgcaatctgctctatatcgtggtcgtggatgggaagggcaatattgtggagcagtactccctgaacgagattatcaacaacttcaatgggattaggattaagaccgactatcacagcctgctcgacaagaaagaaaaagagaggtttgaggcccgccaaaactggacctccattgagaatatcaaagaattaaaggccggctatatttcccaagtcgtccacaagatctgcgagctggtggagaaatatgacgccgtgattgcgctcgaagacttaaattctgggttcaagaactcccgcgtgaaggtggaaaaacaggtgtatcagaaattcgagaaaatgctgatcgacaaactcaattatatggtggataagaagtccaacccgtgtgccacagggggcgcgctgaagggctatcagatcaccaacaagttcgagagcttcaagagcatgagcacccagaacgggtttattttctacatcccggcgtggctcacctccaagattgacccgagcaccggcttcgtgaacctcctgaagacaaagtatacctccattgccgacagcaagaagtttatctcctccttcgaccgcattatgtatgtgccggaggaggacctcttcgagttcgccctcgactacaaaaacttcagccgcacagatgcggattacatcaagaagtggaagctgtactcctacgggaacaggatccgcatcttcaggaatccaaaaaaaaataacgtctttgactgggaggaagtgtgcctgacatccgcctacaaggaactgttcaataaatacggcatcaattaccagcagggcgacattcgcgccctcctctgtgagcagtccgacaaagcgttttactccagcttcatggccctcatgtccctgatgctccaaatgaggaatagcatcacagggcgcaccgacgtcgacttcctcatcagcccggtgaagaactccgacgggatcttttacgactcccgcaactatgaggcgcaagagaatgcgatcctcccgaagaacgccgatgcgaacggggcctataatatcgccaggaaagtgctctgggccatcgggcagttcaaaaaggcggaggatgagaagctcgacaaggtgaaaattgccatttccaacaaggagtggctggagtacgcgcagacctccgtgaagcac

SEQ ID NO: 70 - protein, 1129 aa, Alicyclobacillus acidoterrestris
MAVKSIKVKLRLDDMPEIRAGLWKLHKEVNAGVRYYTEWLSLLRQENLYRRSPNGDGEQECDKTAEECKAELLERLRARQVENGHRGPAGSDDELLQLARQLYELLVPQAIGAKGDAQQIARKFLSPLADKDAVGGLGIAKAGNKPRWVRMREAGEPGWEEEKEKAETRKSADRTADVLRALADFGLKPLMRVYTDSEMSSVEWKPLRKGQAVRTWDRDMFQQAIERMMSWESWNQRVGQEYAKLVEQKNRFEQKNFVGQEHLVHLVNQLQQDMKEASPGLESKEQTAHYVTGRALRGSDKVFEKWGKLAPDAPFDLYDAEIKNVQRRNTRRFGSHDLFAKLAEPEYQALWREDASFLTRYAVYNSILRKLNHAKMFATFTLPDATAHPIWTRFDKLGGNLHQYTFLFNEFGERRHAIRFHKLLKVENGVAREVDDVTVPISMSEQLDNLLPRDPNEPIALYFRDYGAEQHFTGEFGGAKIQCRRDQLAHMHRRRGARDVYLNVSVRVQSQSEARGERRPPYAAVFRLVGDNHRAFVHFDKLSDYLAEHPDDGKLGSEGLLSGLRVMSVDLGLRTSASISVFRVARKDELKPNSKGRVPFFFPIKGNDNLVAVHERSQLLKLPGETESKDLRAIREERQRTLRQLRTQLAYLRLLVRCGSEDVGRRERSWAKLIEQPVDAANHMTPDWREAFENELQKLKSLHGICSDKEWMDAVYESVRRVWRHMGKQVRDWRKDVRSGERPKIRGYAKDVVGGNSIEQIEYLERQYKFLKSWSFFGKVSGQVIRAEKGSRFAITLREHIDHAKEDRLKKLADRIIMEALGYVYALDERGKGKWVAKYPPCQLILLEELSEYQFNNDRPPSENNQLMQWSHRGVFQELINQAQVHDLLVGTMYAAFSSRFDARTGAPGIRCRRVPARCTQEHNPEPFPWWLNKFVVEHTLDACPLRADDLIPTGEGEIFVSPFSAEEGDFHQIHADLNAAQNLQQRLWSDFDISQIRLRCDWGEVDGELVLIPRLTGKRTADSYSNKVFYTNTGVTYYERERGKKRRKVFAQEKLSEEEAELLVEADEAREKSVVLMRDPSGIINRGNWTRQKEFWSMVNQRIEGYLVKQIRSRVPLQDSACENTGDI

SEQ ID NO: 71 - protein, 529 aa, unidentified
  source 1..529: note = Uncultured archaeon
MAKNTITKTLKLRIVRPYNSAEVEKIVADEKNNREKIALEKNKDKVKEACSKHLKVAAYCTTQVERNACLFCKARKLDDKFYQKLRGQFPDAVFWQEISEIFRQLQKQAAEIYNQSLIELYYEIFIKGKGIANASSVEHYLSDVCYTRAAELFKNAAIASGLRSKIKSNFRLKELKNMKSGLPTTKSDNFPIPLVKQKGGQYTGFEISNHNSDFIIKIPFGRWQVKKEIDKYRPWEKFDFEQVQKSPKPISLLLSTQRRKRNKGWSKDEGTEAEIKKVMNGDYQTSYIEVKRGSKIGEKSAWMLNLSIDVPKIDKGVDPSIIGGIDVGVKSPLVCAINNAFSRYSISDNDLFHFNKKMFARRRILLKKNRHKRAGHGAKNKLKPITILTEKSERFRKKLIERWACEIADFFIKNKVGTVQMENLESMKRKEDSYFNIRLRGFWPYAEMQNKIEFKLKQYGIEIRKVAPNNTSKTCSKCGHLNNYFNFEYRKKNKFPHFKCEKCNFKENADYNAALNISNPKLKSTKEEP

SEQ ID NO: 72 - protein, 1093 aa, unidentified
  source 1..1093: note = Lachnospiraceae bacterium
MSNKEKNASETRKAYTTKMIPRSHDRMKLLGNFMDYLMDGTPIFFELWNQFGGGIDRDIISGTANKDKISDDLLLAVNWFKVMPINSKPQGVSPSNLANLFQQYSGSEPDIQAQEYFASNFDTEKHQWKDMRVEYERLLAELQLSRSDMHHDLKLMYKEKCIGLSLSTAHYITSVMFGTGAKNNRQTKHQFYSKVIQLLEESTQINSVEQLASIILKAGDCDSYRKLRIRCSRKGATPSILKIVQDYELGTNHDDEVNVPSLIANLKEKLGRFEYECEWKCMEKIKAFLASKVGPYYLGSYSAMLENALSPIKGMTTKNCKFVLKQIDAKNDIKYENEPFGKIVEGFFDSPYFESDTNVKWVLHPHHIGESNIKTLWEDLNAIHSKYEEDIASLSEDKKEKRIKVYQGDVCQTINTYCEEVGKEAKTPLVQLLRYLYSRKDDIAVDKIIDGITFLSKKHKVEKQKINPVIQKYPSFNFGNNSKLLGKIISPKDKLKHNLKCNRNQVDNYIWIEIKVLNTKTMRWEKHHYALSSTRFLEEVYYPATSENPPDALAARFRTKTNGYEGKPALSAEQIEQIRSAPVGLRKVKKRQMRLEAARQQNLLPRYTWGKDFNINICKRGNNFEVTLATKVKKKKEKNYKVVLGYDANIVRKNTYAAIEAHANGDGVIDYNDLPVKPIESGFVTVESQVRDKSYDQLSYNGVKLLYCKPHVESRRSFLEKYRNGTMKDNRGNNIQIDFMKDFEAIADDETSLYYFNMKYCKLLQSSIRNHSSQAKEYREEIFELLRDGKLSVLKLSSLSNLSFVMFKVAKSLIGTYFGHLLKKPKNSKSDVKAPPITDEDKQKADPEMFALRLALEEKRLNKVKSKKEVIANKIVAKALELRDKYGPVLIKGENISDTTKKGKKSSTNSFLMDWLARGVANKVKEMVMMHQGLEFVEVNPNFTSHQDPFVHKNPENTFRARYSRCTPSELTEKNRKEILSFLSDKPSKRPTNAYYNEGAMAFLATYGLKKNDVLGVSLEKFKQIMANILHQRSEDQLLFPSRGGMFYLATYKLDADATSVNWNGKQFWVCNADLVAAYNVGLVDIQKDFKKK

SEQ ID NO: 73 - DNA, 4101 bp, synthetic construct
  source 1..4101: mol_type = other DNA
gacaagaagtactccattggcctggcgattgggacaaactcggtggggtgggccgtgattacggatgagtacaaggttccaagcaagaagttcaaggtcctcgggaacacagatcggcattcgattaagaagaatctcattggggcgctcctcttcgactcgggggagacagcggaggctaccaggctcaagcggacagccaggcggcggtacacaaggcggaagaatcgcatctgctacctccaggagattttctcgaatgagatggcgaaggtggacgacagcttcttccatcggctggaggagtccttcctggtggaggaggataagaagcacgagaggcatccaattttcgggaacatcgtggacgaggttgcgtaccatgagaagtaccctacaatctaccatctgcggaagaagctggttgactccacagacaaggcggacctgaggctgatctacctcgctctggcccacatgattaagttccgcgggcatttcctgatcgagggggacctgaatcccgacaattcggatgtggacaagctcttcatccagctggtgcagacctacaaccagctgttcgaggagaatcccatcaatgcgtcgggcgttgacgctaaggccattctgtccgctaggctgtcgaagagcaggaggctggagaacctgatcgcccagctgccaggcgagaagaagaatgggctcttcgggaatctgattgcgctctccctggggctgacaccgaacttcaagagcaatttcgatctggctgaggacgcgaagctccagctctcgaaggacacttacgacgatgacctcgataacctcctcgcgcagatcggggaccagtacgctgatctcttcctcgccgctaagaacctctcggatgctatcctgctctccgacattctccgggttaataccgagattacaaaggccccactgtcggcgtccatgatcaagcggtacgatgagcatcatcaggatctcaccctgctcaaggccctcgtgcggcagcagctgcccgagaagtacaaggagattttcttcgaccagagcaagaatgggtacgctggctacattgacggcggggcctcacaggaggagttctacaagttcatcaagccaatcctggagaagatggatgggacagaggagctgctggtgaagctcaaccgggaggatctgctcaggaagcagcggacgttcgacaacgggtcgattccccatcagatccacctgggggagctgcacgcgatcctgcgccggcaggaggatttctaccctttcctgaaggataatcgggagaagatcgagaagattctcaccttccggattccctactacgtcgggccactcgcgcggggcaatagcaggttcgcctggatgacacggaagagcgaggagacaatcaccccctggaacttcgaggaggttgtcgacaagggggcgtccgcccagtcattcattgagcggatgaccaatttcgacaagaatctgccaaatgagaaggttctcccaaagcatagcctcctctacgagtacttcactgtttacaacgagctgaccaaggtgaagtatgtgaccgagggcatgcggaagcccgcgttcctgtccggcgagcagaagaaggccattgtggacctcctgttcaagaccaatcgcaaggtcacagtcaagcagctcaaggaggattacttcaagaagatcgagtgcttcgactcggttgagattagcggggtggaggatcggttcaacgcgagcctcggcacttaccacgacctcctgaagatcatcaaggataaggacttcctcgacaacgaggagaacgaggatattctggaggacatcgtgctcaccctgacgctgttcgaggatcgggagatgatcgaggagcgcctgaagacctacgctcatctcttcgatgataaggtcatgaagcagctgaagaggaggcggtacaccgggtggggccgcctgagcaggaagctcattaacgggatcagggacaagcagagcggcaagaccatcctggacttcctcaagagcgatggcttcgccaaccggaatttcatgcagctcatccacgacgactccctcaccttcaaggaggacattcagaaggctcaggtcagcggccagggcgactcgctgcatgagcacatcgctaacctggcgggcagcccagccatcaagaagggcatcctccagacagtgaaggtcgtggatgagctggtgaaggtcatgggccggcataagcccgagaatattgtgattgagatggcgcgggagaatcagaccactcagaagggccagaagaactcgcgggagcgcatgaagaggatcgaggaggggattaaggagctgggcagccagattctcaaggagcaccccgtggagaatacccagctccagaacgagaagctgtacctctactacctccagaatgggcgggacatgtatgttgatcaggagctggacatcaatcgcctctcggattacgacgtggaccacatcgtgccccagagcttcctgaaggatgatagcatcgacaataaggtcctgacccgctccgacaagaatcgcggcaagagcgacaacgtgccgagcgaggaggtcgtgaagaagatgaagaactactggcggcagctgctgaacgcgaagctcattacacagcggaagttcgataacctgacgaaggcggagaggggcggcctctccgagctggacaaggcgggcttcattaagaggcagctcgtggagactcgccagatcaccaagcacgtggctcagatcctcgatagccggatgaatacgaagtacgatgagaatgacaagctcatccgggaggtgaaggtaatcaccctgaagtcaaagctcgttagcgatttccggaaggacttccagttctacaaggtgcgggagattaacaactaccatcatgcgcacgatgcgtacctcaatgcggtggtgggcacagccctgattaagaagtaccccaagctggagagcgagttcgtctacggggactacaaggtgtacgatgttcggaagatgatcgccaagagcgagcaggagattgggaaggccaccgctaagtacttcttctactcgaatattatgaatttcttcaagaccgagatcacactcgctaatggggagattcggaagcggcccctcatcgagactaacggggagactggcgagattgtgtgggacaaggggcgcgacttcgctaccgtgcgcaaggtcctctcgatgccccaggttaatattgttaagaagacagaggtgcagacgggcgggttctccaaggagtctatcctgccgaagcggaactcggacaagctgatcgcccgcaagaaggattgggaccccaagaagtacgggggattcgatagcccaaccgtggcttacagcgtcctggtggtcgccaaggttgagaaggggaagtcgaagaagctcaagagcgttaaggagctgctgggcatcaccatcatggagcggtccagcttcgagaagaatcctatcgacttcctggaggctaaggggtacaaggaggtcaagaaggacctgatcattaagctgcccaagtactctctgttcgagctggagaacgggaggaagcggatgctggcgtctgctggcgagctacagaagggcaatgagctggcgctcccctcgaagtatgtcaacttcctctacctggcttcccattacgagaagctgaagggctcgcccgaggataatgagcagaagcagctcttcgtggagcagcacaagcactacctcgacgagatcattgagcagatttcggagttctcgaagcgggtcattctcgcggacgcgaacctcgacaaggtcctctcggcgtacaacaagcaccgggacaagcccatccgggagcaggccgagaacattatccacctcttcacactgaccaacctcggcgctcccgccgcgttcaagtacttcgacaccaccattgaccgcaagagatacacatccaccaaggaggtgctggacgcgaccctcatccaccagagcatcacaggcctctacgagacacggatcgacctctcgcagctcgggggcgat

SEQ ID NO: 74 - DNA, 4092 bp, synthetic construct
  source 1..4092: mol_type = other DNA
gacaagaagtactcgatcggcctggcgattggcacaaacagcgtggggtgggctgtgatcactgatgagtacaaggtgccatcgaagaagttcaaggtgctggggaatacagaccggcattcgatcaagaagaatctcattggcgctctcctcttcgattccggcgagactgctgaggcgacccgcctgaagcgcaccgcccggcggcgctacactcggcggaagaataggatttgctacctccaggagattttctcgaatgagatggccaaggtggatgacagcttcttccaccgcctggaggagtcgttcctggtcgaggaggacaagaagcatgagcggcaccctatcttcgggaatatcgttgatgaggtcgcctaccacgagaagtaccccactatctaccatctccgcaagaagctcgtggacagcacagataaggccgacctccgcctgatctacctcgccctcgcgcacatgattaagttccgggggcacttcctcattgagggggatctgaatcccgataactccgacgtggacaagctgttcatccagctggtgcagacatacaaccagctgttcgaggagaatcccatcaacgcgagcggcgtggacgctaaggccattctgtcggctaggctctcgaagtcgaggcggctggagaacctgattgcgcagctccccggcgagaagaagaacgggctgttcgggaatctcatcgccctctccctcggcctcacaccaaacttcaagagcaatttcgacctggctgaggacgctaagctgcaactctcaaaggatacatacgatgacgacctggacaatctcctggctcagatcggcgaccagtacgctgacctgttcctcgcggccaagaatctgtcggacgcgattctcctcagcgacatcctgcgcgtcaataccgagattacgaaggctccactgtctgcgtcaatgattaagcggtacgatgagcatcaccaggatctgaccctcctgaaggcgctcgtgcggcagcagctgcccgagaagtacaaggagattttcttcgatcagagcaagaatggctacgccggctacatcgacgggggcgcgagccaggaggagttctacaagttcatcaagcccatcctggagaagatggacggcaccgaggagctactcgtgaagctcaatcgggaggatctcctccggaagcagcggacattcgataacgggtctatcccacaccagatccacctcggcgagctgcatgcgattctgcggcggcaggaggatttctaccctttcctgaaggacaaccgggagaagatcgagaagatcctcacattccggattccatactacgtcggccccctggcgaggggcaatagccggttcgcgtggatgacaaggaagtccgaggagactattaccccgtggaatttcgaggaggtggttgacaagggcgcttccgcgcagagcttcattgagcggatgacaaacttcgacaagaatctccccaacgagaaggtcctgccgaagcatagcctcctgtacgagtacttcaccgtctacaatgagctaactaaggtcaagtatgtgacagagggcatgaggaagccagccttcctctcaggcgagcagaagaaggccattgtggacctcctgttcaagacaaaccgcaaggtgacagtgaagcagctgaaggaggattacttcaagaagattgagtgcttcgactcagtggagatttcaggcgtggaggatcggttcaacgcgagcctggggacttaccacgacctgctgaagattattaaggacaaggacttcctggataacgaggagaatgaggacatcctggaggatattgtgctcaccctcaccctgttcgaggacagggagatgattgaggagaggctcaagacctacgcgcacctgttcgatgacaaggtcatgaagcagctgaagaggcggcgctacactgggtggggccgcctgtcgcggaagctgatcaacggcattcgggataagcagtccgggaagaccattctggatttcctgaagtcggacggcttcgccaacaggaatttcatgcagctgatccacgacgactccctcaccttcaaggaggacattcagaaggcccaggttagcggccagggggactcactccacgagcatattgccaatctggccggctctccagctatcaagaagggcatcctgcaaacagttaaggttgttgacgagctggttaaggtcatggggcggcataagcccgagaacattgtcatcgagatggctcgggagaaccagacaactcagaagggccagaagaactccagggagcgcatgaagcggattgaggagggcattaaggagctggggtcccagatcctcaaggagcaccctgtcgagaacactcagctgcaaaacgagaagctctacctgtactacctccagaacgggcgggatatgtatgtggatcaggagctggacatcaacaggctctccgactacgacgtggatcacattgtcccacagtctttcctcaaggatgattccatcgacaacaaggtgctgacgcgcagcgacaagaatagggggaagtcggacaacgttccgagcgaggaggtcgtgaagaagatgaagaattactggaggcagctcctgaatgcgaagctgatcactcagaggaagttcgacaatctgacaaaggcggagaggggcgggctctcggagctggataaggcgggcttcatcaagcggcagctcgttgaaacccggcagatcaccaagcatgtcgcccagatcctcgatagccgcatgaacaccaagtacgatgagaacgacaagctcattcgggaggttaaggtcattacgctgaagtccaagctcgtcagcgacttcaggaaggatttccagttctacaaggttcgggagattaacaactaccaccacgcgcatgatgcgtacctgaacgctgttgtcggcactgctctcatcaagaagtacccaaagctggagtccgagttcgtctacggggactacaaggtctacgatgtccggaagatgatcgccaagtcggagcaggagatcgggaaggctactgcgaagtacttcttctacagcaacattatgaatttcttcaagacggagattacgctggcgaacggggagattaggaagaggcccctcattgagactaatggggagacaggcgagattgtttgggacaagggccgcgacttcgcgactgtgcggaaggtcctgtccatgccacaggtgaatattgttaagaagacagaggtgcagactgggggcttctcgaaggagagcattctcccaaagcggaacagcgataagctcatcgcgcgcaagaaggattgggaccctaagaagtacggcggcttcgattctcccactgtggcctactccgttctcgtggttgccaaggttgagaaggggaagtcgaagaagctgaagtcggtcaaggagctgctcgggattacaatcatggagcggagcagcttcgagaagaaccctattgatttcctggaggccaagggctacaaggaggttaagaaggatctcattatcaagctccctaagtactctctgttcgagctggagaatggccggaagaggatgctggcctcggctggcgagctacagaaggggaatgagctggccctcccgtcgaagtatgtgaatttcctgtacctcgcgtcgcactacgagaagctcaagggcagcccggaggataatgagcagaagcagctcttcgtggagcagcataagcactacctggacgagatcattgagcagatcagcgagttctcgaagcgggttattctggctgatgctaacctggacaaggttctgagcgcctacaataagcatcgcgacaagccgattcgcgagcaggcggagaatattatccacctgttcaccctcactaacctcggggctcccgcggccttcaagtacttcgataccacaatagataggaagcggtacacctcgacgaaggaggtcctcgacgccacactcatccatcagtcgattacaggcctgtacgagacacggattgacctctcgcagctg

SEQ ID NO: 75 - DNA, 4101 bp, synthetic construct
  source 1..4101: mol_type = other DNA
gacaagaagtattccataggcctggctatcggcaccaacagcgtgggctgggccgtcatcaccgacgagtacaaagtgccgagtaaaaagttcaaagtgctcggcaacaccgaccgccactccataaagaaaaacctgatcggggcgctcctgttcgacagcggcgagacggcggaggccacccgcttgaaacgcacggcccgacggcgctacacgcggcgcaagaaccggatctgttacctacaggagattttctctaacgagatggcgaaggtggacgactcgttctttcaccgcctcgaagagtccttcctcgtggaggaggacaagaaacacgagcgccacccgatcttcggcaacatcgtggacgaggtggcctaccacgagaagtacccgaccatctaccacctccggaagaaactcgtggacagcacggacaaggccgacctgaggctcatctacctcgccctggcgcacatgattaagttccggggccacttcctgatcgagggcgacctgaacccggacaacagcgacgtggacaagctgttcatccagctagtccagacctacaaccagcttttcgaggaaaaccccatcaacgccagcggggtggacgcgaaggcgatcctgtccgcccggctgagcaagtcccggcggctggagaacctcatcgcgcagttgcccggcgagaagaagaacgggctgttcgggaacctgatcgccctctccctggggctcaccccgaacttcaagtccaacttcgacctcgccgaggacgccaaactacagctgagcaaggacacctacgacgacgacctcgacaacctgctggcccagatcggggaccagtacgcagacctgttcctcgccgccaagaacctctccgacgccatcctgctgtcggacatcctgcgggtgaacacggagatcacgaaggccccgctctcggcctcgatgattaaacgctacgacgagcaccaccaggacttgaccctcctcaaggcgctggtccgccagcagcttcccgagaagtacaaggaaatctttttcgatcagagcaagaacgggtacgccgggtacatcgacggcggggcgtcccaggaggagttctacaagttcatcaagcccatcctggagaaaatggacgggaccgaggagctgctcgtgaagctcaaccgcgaagatttgctccgcaagcagcgcacgttcgacaacgggtcgatcccgcaccagatccacctgggcgagctgcacgcgatcctcaggcgtcaggaagacttctaccccttcctcaaggacaaccgcgagaagatagagaagattctgaccttcagaattccttattacgtgggcccgctggctcggggcaactcgcgcttcgcctggatgacgcgcaagtccgaggagaccatcaccccgtggaacttcgaggaggtggtggataagggtgcctcggcccagtccttcatcgagcggatgaccaacttcgacaagaacctgccgaacgagaaggtgctccccaagcacagcctgctctacgaatatttcacggtgtacaacgagctgacgaaggtcaagtacgtgaccgagggaatgaggaaacctgcattcctctccggggagcagaagaaagccatagtcgacctcctgttcaagaccaaccggaaggtcaccgtcaagcagctcaaggaggactacttcaagaagatcgagtgcttcgattcagtggagatcagcggcgtcgaggaccggttcaacgccagcctgggcacctaccacgacctgctcaagatcatcaaggacaaggacttcctcgacaacgaggagaacgaggacatcctggaggacatcgtgctgaccctgacgctcttcgaggaccgcgagatgatcgaggagcgcctcaagacctacgcccacctgttcgacgacaaggtgatgaagcagctcaagcggcggagatatactgggtggggccgcctctcccggaagctcattaacggtatcagggataagcagtccgggaagacgatcctcgacttcctcaagtcggacgggttcgccaaccgcaacttcatgcagctcatccacgacgactccctgacgttcaaggaggacatccagaaggcccaagtgtctggtcaaggtgactcgctccacgagcacatcgccaacctcgcgggcagcccggccatcaagaagggaatactccagaccgtcaaggtggtggacgagctggtgaaggtcatgggccgccacaagccggagaacatcgtcatcgagatggcgcgggagaaccagaccacgcagaaggggcagaaaaatagccgtgagcgcatgaagcgcatcgaggaggggattaaggagttgggcagccagatcctcaaggagcaccctgtggagaacacgcagttgcaaaacgagaagctctacctgtactacctccagaacgggagggatatgtacgtggaccaagaactggacatcaaccgcctgtccgactacgacgtggaccacatcgtgccgcagagcttcctcaaggacgacagcatcgacaacaaggtgctcacccggtccgacaagaatcggggcaagtccgacaacgtgcccagcgaggaggtcgtcaaaaagatgaaaaactactggcgacaactactgaacgccaagctcatcacccagcgcaagttcgacaacctcacaaaagccgagcgcggcgggttgagcgagctggacaaggccgggttcatcaagcgccagctcgtcgagacgcgccagatcacgaagcacgtcgcgcagatactcgacagccggatgaacaccaagtacgacgagaacgacaagctcatccgggaggtgaaggtcatcaccctcaagtcgaagctcgtgagcgacttccgcaaggacttccagttctacaaggtccgggagatcaacaactaccaccacgcccacgatgcttatcttaacgccgtggtggggacggccctcattaagaaatacccgaagctggagtcggagttcgtgtacggcgactacaaggtgtacgacgtcaggaagatgatcgccaagtccgaacaggagatcgggaaggccacggcgaaatacttcttctacagcaacatcatgaacttcttcaagaccgagatcaccctcgccaacggcgagatccgcaagcgcccgctcatcgagacgaacggggagaccggcgagatcgtctgggacaaggggcgcgacttcgccactgtgcggaaggtgctgtcgatgccccaggtcaacatcgtcaagaagacggaggtccagacgggcgggttcagcaaggagagcatcctgccgaagcgcaacagcgacaagctgatcgcccgcaaaaaggactgggatccaaaaaagtacggcggcttcgacagccccaccgtcgcctacagcgtcctcgtcgtcgctaaagtcgagaagggcaagtccaaaaagctcaagagcgtcaaggagctgctcgggatcaccatcatggagcggtccagcttcgagaagaacccaattgatttcctggaggcgaagggctacaaggaggtcaagaaagacctcatcataaagctgccgaagtactcactcttcgagctggagaacgggcgcaagcggatgctggcgtcggccggagagctccaaaagggcaacgagctggcgctgccgagcaagtacgtgaacttcctctacctggcgtcccactacgagaagctcaagggcagtccagaggataacgagcagaagcagctattcgtggagcagcacaagcactacctggacgagatcatcgagcagatcagcgagttctccaagcgcgtcatcctggcggacgccaacctggacaaggtgctgtccgcgtacaacaagcaccgcgacaagccgatccgcgagcaagccgagaacatcatccacctgttcaccctcacgaacctcggggcacccgccgccttcaaatatttcgacacgaccatcgaccgcaagcgctacaccagcacgaaggaggtgctcgacgccaccctgatccaccagagcatcaccgggctgtacgagacccgcatcgacctctcgcagctcggcggggac

SEQ ID NO: 76 - DNA, 4101 bp, synthetic construct
  source 1..4101: mol_type = other DNA
gacaagaagtacagtattggattggccatcgggacgaacagcgtgggctgggccgtcatcaccgacgagtacaaggtgccatccaagaagtttaaggttctggggaataccgaccgccactcgatcaagaaaaatctcatcggggcgctgcttttcgacagcggcgagacggcggaagcgacgcggctcaagcggacggctcgtcgccgttacacccggcgtaagaaccgcatctgttacctccaggagatattcagcaacgagatggcgaaggtggacgactcctttttccaccgtcttgaggagtccttcctggtcgaggaggacaagaagcacgagcgccacccgatcttcgggaacatcgtggacgaggtggcctaccacgagaagtaccccacgatctaccacctccgcaaaaaactcgtggactcaactgacaaggccgatttgaggcttatctacctcgccctcgcccacatgattaagttccgtgggcacttcctaatcgagggtgacctcaaccccgacaactctgacgtggacaagctgttcatccagcttgtgcagacctacaatcagctctttgaggagaatccgatcaacgcatctggtgtggacgcaaaggccatcctcagcgcgcggctgagcaagtctaggcggttggagaacctgatcgcccaactgcccggcgagaagaaaaatggcctcttcggcaacctgatcgccctgtcgctggggctcacgccgaacttcaagagtaactttgacctggcggaggacgctaagctccagctatctaaggacacatacgacgacgacctggacaacctgctggcccagatcggcgaccagtacgccgacctcttcctagccgccaagaacctgtccgacgccatcctcctcagcgacatcctgcgcgtgaacacggagatcacgaaggctccgctcagcgcctccatgattaagcggtacgacgagcaccaccaagacctaactttactcaaagccctcgtgcggcagcagcttcccgagaagtacaaagagatattttttgatcagtccaagaacggttatgcgggctacatcgacggcggcgcgagccaggaggagttctacaagttcatcaagcccatcctggagaagatggacggcacggaggagctgctcgtgaagctcaaccgtgaagacctcctgcgaaagcagcgaaccttcgacaacggttcgatcccgcaccagatccacctcggggagctgcacgccatcctgaggcgacaggaggacttctaccctttcctaaaggacaaccgcgagaagattgaaaaaatcctgacgtttcgcataccctactacgtcggcccgctggcgcgcggcaactcccggttcgcctggatgacccgtaagagcgaggagacgatcaccccgtggaacttcgaggaggtcgtggacaagggcgcgagcgcgcagagcttcatcgagcgcatgaccaacttcgacaagaacctcccgaacgagaaggtgctcccaaagcactccctcctgtacgagtatttcaccgtgtacaacgagttgacaaaggtgaagtacgtgacggagggaatgcggaagcctgcgttcctctcgggcgagcagaagaaggcaatcgtggacctgctcttcaagaccaaccggaaggtgacggtgaagcagctcaaggaggactacttcaaaaaaatcgagtgcttcgactccgtggagataagcggcgtggaggaccgattcaacgcctccctcggcacctaccacgacctccttaagatcatcaaggacaaggacttcctggacaacgaggagaacgaggacatcctggaggacatcgtgctcaccctgaccctcttcgaggaccgggagatgatcgaggagcgcctcaagacgtacgcccacttgttcgacgacaaggtgatgaagcagctcaagcggcggcgatacaccgggtggggccgcctatcccgcaaacttatcaacggcatccgcgacaagcagtccggcaagacgatcctggatttcctcaagtcggacgggttcgccaaccggaacttcatgcagctcatccacgacgacagcctcacgttcaaggaggacatccagaaggcccaagtgagcggtcaaggggacagcctccacgagcacattgcgaaccttgctgggagccctgcgatcaagaaggggatattgcaaaccgtgaaggtcgtggacgagttggtgaaggtcatggggcgacacaagcccgagaacatcgtgatcgagatggccagggaaaatcagaccacgcagaagggccaaaaaaacagccgcgagcggatgaagcggatcgaggagggcatcaaggagctggggtcgcagatcctcaaggagcacccggtggagaacacgcagctccagaacgagaagctgtacctctattacctacagaacgggcgggatatgtacgtggaccaggagctagacatcaaccgcctgtccgactacgacgtggaccatatcgtcccgcagtcgttcttgaaggacgacagcatcgacaacaaggtgctcacaagatcggataagaatcgaggcaagtccgacaacgtgccctcggaggaggtggtcaagaaaatgaaaaactactggcggcagttgctgaacgccaagctcattacgcagcggaagttcgacaacctgacgaaggctgaacgtggtgggctcagcgagctagacaaggcggggttcatcaagcggcagctcgtcgagacccggcagatcaccaagcacgtggcgcagatcctggactcgcgcatgaacaccaagtacgacgagaacgacaagctcatccgtgaggtgaaggtcatcacccttaagtctaagctggtcagtgacttccgcaaggacttccagttctacaaggtccgggagatcaacaactaccaccacgcgcacgacgcctacctcaacgcggtggtggggacggcgcttattaagaaatatcccaagctggaaagcgagttcgtttacggcgactacaaggtgtacgacgtccgcaagatgatcgcaaagtcggaacaggaaatcggaaaggcgacggccaaatatttcttttactccaacatcatgaatttttttaagacggagatcaccctggcgaacggggagatccgcaagcggcccctcatcgagaccaacggggagacgggcgagatcgtctgggacaagggccgggacttcgccaccgtgcggaaggtgctttctatgcctcaagtcaatatcgtcaaaaagacagaggtgcagaccggcgggttcagcaaggagtctatcctgccgaagcgcaactcggacaagctcatcgcgcgcaagaaagactgggaccccaaaaaatatggcgggttcgactcgccgaccgtcgcctacagcgtcctcgtggtggctaaggtcgagaagggcaagagcaaaaagctaaagtcggtgaaggagctgctgggcatcaccatcatggagcgctcgtctttcgagaagaatccaatcgacttcctagaggcgaaggggtacaaggaggtcaaaaaggatcttatcatcaaactgccgaagtacagtctgttcgagctggagaacgggcggaagcggatgctggctagtgcgggcgagttgcagaagggcaacgagttggcactgccctccaagtacgtgaacttcctgtacctggcctcccactacgagaagctcaaggggagccccgaggacaacgagcagaagcagctattcgtcgagcagcacaagcactacctggacgagatcatcgagcagatcagtgagttctccaagcgggtcatcctcgcggacgccaacctggacaaggtgctgagcgcgtacaacaagcacagggacaagccaatcagggaacaggccgagaacatcatccacctgttcaccctgaccaacctgggtgcaccggctgccttcaagtactttgacacgaccatcgaccggaagcgctacacctccacgaaggaggtgctggacgccacgctgatccaccagagcatcaccgggctctacgagacacggatcgacctgagccagcttggcggggac

SEQ ID NO: 77 - DNA, 4092 bp, synthetic construct
  source 1..4092: mol_type = other DNA
gacaaaaagtattccattggactcgctatcggcacgaacagcgtcgggtgggcggtcatcactgacgagtacaaggtgccgagcaagaagtttaaggtgctgggaaacaccgacaggcactcgatcaagaaaaatcttatcggggccctactcttcgactccggagaaaccgccgaggccacccggttgaagcgcacggcccgccgtcgctacaccaggcgcaagaaccggatctgctacctccaggagatattcagcaatgagatggcgaaggtggacgactcgttttttcacaggctagaggagtctttcctcgtggaggaggacaagaaacacgagcgccaccccatcttcggcaacatcgtggatgaggtggcatatcacgagaagtacccaaccatctaccacctccgcaaaaagctcgtggactctaccgacaaggccgacctccgtctgatctacctcgcgctggcccacatgattaagttccgaggacactttctgatcgagggcgacctgaacccagacaacagcgacgtggacaagctgttcatccaacttgtccagacctacaatcagctcttcgaggagaaccctatcaacgcctcgggcgtggacgcgaaggccatcctgtccgcccgcctgagcaagtcgcggcggctggagaacctgatcgcccagctccccggcgaaaaaaagaacggcctcttcggcaacctcatcgcgttgtcgctggggctcaccccgaacttcaagtccaacttcgacctggccgaggacgctaaactccagctctcgaaggatacctacgacgacgacctcgacaacctgctggcccagatcggcgaccagtacgcggaccttttcctggcggccaagaacctgagcgacgcgatcctccttagcgacatactccgtgtgaacaccgagatcacgaaggccccgctctccgcgtccatgattaagcgctacgacgagcaccaccaagaccttaccctgcttaaggcgctggtcaggcagcagttaccggagaagtacaaggagatcttttttgatcaatctaagaacggttacgccgggtacatcgacggcggcgcgtcccaggaggagttctacaagttcatcaagccgatcttggagaaaatggacgggaccgaggagctgctcgtgaagctcaaccgcgaagacctcctccgcaagcagcgcaccttcgacaacgggagcatcccgcaccagatccacctgggagagctgcacgcgatcctgcggagacaagaggacttctaccccttcctcaaggacaaccgggagaagattgaaaaaatacttacttttcgtatcccgtactacgtcgggccccttgcgaggggcaactccagattcgcgtggatgacccgcaagtccgaggagaccatcaccccgtggaacttcgaggaggtggtggacaagggcgcgtcggcccagtcgttcatcgagcgcatgaccaacttcgacaagaaccttccgaacgagaaggtgctcccgaagcacagcctgctctacgaatattttactgtgtacaacgagctgacgaaggtcaagtacgttacggaggggatgaggaagcccgccttcctctccggcgagcagaagaaagccattgtggatctcctgttcaagaccaaccgcaaggtgacggtgaaacagctcaaagaggactacttcaagaagatcgagtgcttcgactccgtagagatcagcggggtcgaggaccgcttcaacgcctcgctgggcacgtaccacgacctgctaaagattatcaaggacaaagacttcctagacaatgaggagaacgaggacattctggaggacatcgtgctgactctgacgctgttcgaagaccgcgagatgatcgaggagcggcttaagacgtacgcccacctgttcgacgacaaggtgatgaagcagttgaaacggcggcgctacaccgggtggggccgcctctcccgcaagctcatcaacggcatccgcgacaagcagtcggggaagacgatcctggacttcctcaagagcgacggcttcgccaaccgaaacttcatgcagctaatccacgacgacagcctgacgttcaaggaggacatccagaaggcccaagtgagcggccagggagactcgctacacgagcatatcgccaacctggctggcagcccggcgattaagaaaggaatcctccaaaccgtcaaagtggtggacgagctggtgaaggtgatgggccgccacaagcccgagaacattgtgatcgagatggcgcgggagaaccagacgacgcagaagggccaaaaaaatagcagggaaaggatgaagcgaatagaggaggggatcaaggagctggggagccagattctcaaagagcacccggtcgagaacacacagctccagaacgagaagctgtacctctactacctccaaaacggccgcgatatgtacgtggaccaggaactagacatcaaccggctgagcgactatgacgtggaccacatcgtgccgcagtccttcctcaaggacgactcgattgacaacaaagtgctcactagatccgacaagaacagaggcaagagcgataacgtcccgtcggaggaggtcgtcaagaaaatgaaaaactactggcggcagctcctaaacgccaagctcatcacgcagcgtaagttcgacaacctgacgaaggcggagcggggcgggctgagcgagctggacaaagcggggttcatcaagcggcagctcgttgagacgcggcagatcacaaagcacgtcgcgcaaatcctcgactcccgcatgaacaccaagtacgacgagaacgacaagctcatccgggaggtgaaggtcattacccttaaatcgaagctcgtcagcgactttcgtaaggacttccagttctacaaggtcagagagatcaacaactaccaccacgcccacgacgcctatctgaacgccgtggtgggcaccgcgcttattaagaagtaccccaagctggagtccgagttcgtgtacggcgactacaaggtttatgacgtcaggaagatgatcgccaagtcggaacaggagatcggaaaagctaccgccaaatatttcttctatagcaacatcatgaacttcttcaaaaccgagatcaccctcgccaacggcgagatccggaagcgcccgctcatcgagaccaacggggagaccggggagatcgtctgggacaaggggcgggacttcgctactgtccgaaaggtgctctccatgccacaagtgaatatcgtcaagaaaacagaggtgcagaccggagggttcagtaaggagtccatcctgcccaagcggaactccgacaagctaattgctcgcaaaaaggattgggatcctaaaaaatatggcggcttcgactcgcccacggtcgcctactctgtgctggtcgtggcgaaggtggagaagggcaagtccaagaagctcaagagcgtcaaggagctgctggggatcacgatcatggagcgtagttcgtttgagaagaatcccatcgacttcctggaggctaagggctacaaggaggtcaaaaaggacctcatcattaagctgccgaagtacagcctcttcgagctggagaacgggcggaagcgtatgctcgcctccgctggggagttacaaaaggggaacgagctggcgctgccgtctaagtacgtcaacttcctgtacctggcctcccactacgagaagctcaaggggtcgccggaggacaacgagcagaagcagctcttcgtagagcagcacaagcactacctggacgagatcatcgagcagatttcagagttctcaaagcgggtcatcctcgccgacgccaacctggacaaggtgctctcggcctacaacaagcaccgggacaagccgatccgcgaacaggccgaaaacatcatccacctgttcacgctcaccaacctcggtgccccggcggccttcaagtactttgacacgaccatcgaccggaagcgctatacctcgacgaaggaggtgctggacgccaccctgatccaccagtccatcaccgggctttacgagacccggatcgacctctcgcagcta

SEQ ID NO: 78 - DNA, 4101 bp, synthetic construct
  source 1..4101: mol_type = other DNA
gacaagaagtatagtattggactcgccatcggaaccaactctgtggggtgggctgttattacagatgaatataaggtgccatccaaaaagtttaaagttctgggcaatactgatagacactcaatcaagaagaatctgataggtgcacttctgtttgatagtggagagactgccgaggcaaccagacttaaaaggactgcaagaagaagatataccagaagaaagaataggatttgctatttgcaggaaatcttcagcaacgaaatggccaaggttgatgactcatttttccataggttggaggagagttttcttgtggaggaagataagaagcacgaaagacacccaattttcgggaatatagtggacgaggtggcttatcatgagaagtatcccactatctaccacctgagaaagaaacttgtggactcaaccgataaggctgatcttaggcttatatacttggcccttgcacatatgatcaaattcaggggccattttcttatcgaaggcgatcttaatcccgataactcagatgtggacaagctgtttatacaacttgtgcaaacctacaatcaactcttcgaggagaatcccattaacgcctccggcgtggatgcaaaagccatactgtcagccagactgagcaaaagtaggagactggagaatcttatagcccaactgcccggtgaaaagaagaatgggctcttcggaaatctgatcgctctttcattggggttgacacccaactttaagagtaactttgacttggcagaagatgcaaagttgcagctcagtaaagacacatatgacgatgaccttgacaatctcttggcacaaataggggatcaatacgctgaccttttcctcgctgccaagaacctcagcgacgctatactgttgtccgacattcttagggttaataccgaaattacaaaggcccctcttagtgcaagtatgatcaaaaggtatgatgagcatcaccaagaccttacactgctgaaggctctggttagacagcaactccctgaaaagtataaggaaatattcttcgaccaaagtaagaacgggtacgccggttatattgatgggggcgcaagtcaagaagaattttacaaattcatcaagccaattcttgaaaagatggacgggactgaggaattgctggtgaaactgaatagagaggaccttcttagaaaacagaggacatttgacaatgggtccatcccacaccagattcatctgggggaactccacgcaatattgaggagacaagaagacttttacccattccttaaggataatagagagaaaatcgaaaaaatcctgactttcaggattccttactatgttgggccactggccagggggaactcaagattcgcttggatgacaaggaagtcagaagaaaccataaccccttggaattttgaagaggtggttgataagggggcatcagcccagtctttcatagagaggatgaccaactttgataaaaatcttccaaatgagaaggttttgccaaaacatagtcttttgtacgagtactttactgtttataacgaattgaccaaggtgaagtatgtgaccgagggaatgaggaagccagcatttttgtccggggagcaaaagaaagcaatcgttgatcttctcttcaagaccaacagaaaagtgaccgtgaaacaactgaaggaagactacttcaaaaagatagaatgtttcgattcagtggaaattagcggtgttgaagacaggttcaatgcttcattgggtacttaccacgacctgttgaagataatcaaagacaaggactttctcgataatgaggagaacgaagacatcttggaagacattgtgcttacactcactttgtttgaggacagggaaatgattgaggaaagactcaaaacttacgctcatttgtttgatgataaggttatgaaacaactaaaaagaagaaggtacaccggctggggaagattgagtaggaaactgatcaacggtattagagataaacaatccggaaagactatcctcgatttccttaagagtgatggctttgcaaataggaattttatgcagctgattcatgacgactcacttaccttcaaagaagacatccaaaaagctcaggtgtctgggcaaggcgacagtctgcatgaacatatagctaacttggctgggagtcccgccatcaagaaggggatacttcaaacagttaaagttgtggacgaattggtgaaggtaatgggaaggcacaagcctgaaaatatagtgatagaaatggcaagggaaaatcaaacaacccagaagggacagaagaacagtagggaaaggatgaaaaggatagaagaggggatcaaagagcttggtagccagatcctcaaggaacatccagtggagaatacccaacttcaaaacgagaaactctatttgtactacttgcagaacggaagagatatgtatgtggaccaagagcttgatattaacaggctgagcgattatgacgttgaccacatagtgccccaatcattcctcaaggatgactctattgataataaggtgctgacaaggagtgacaagaatagagggaaatccgacaacgttccatccgaggaagttgtgaagaagatgaagaactactggaggcagttgctgaacgctaagctcattacccagaggaaattcgataacctgaccaaagcagagagaggcgggctgagcgaactcgataaagcaggtttcatcaagagacaactcgtggagactaggcaaattactaagcacgtggctcaaatactcgacagcaggatgaacacaaagtacgacgagaacgacaagctcattagagaggttaaggttattactctgaaaagtaaattggttagcgatttcagaaaggatttccaattctataaggttagagagatcaacaattatcatcatgcacatgatgcctatctgaatgctgtggttggtacagcccttatcaagaagtaccctaagctagagagcgagtttgtgtacggagattataaggtgtatgatgtgaggaaaatgatcgctaaaagtgagcaagagattggaaaggctaccgccaaatacttcttttattccaatattatgaatttcttcaagacagaaatcaccctggctaacggcgagataaggaagaggccgcttatcgaaactaatggggagacaggcgaaatagtgtgggacaaagggagggatttcgcaactgtgaggaaggttttgagcatgcctcaggtgaatatcgttaagaaaaccgaagttcaaactggagggttctctaaggaaagcattctccccaagaggaactccgacaagctgattgctagaaagaaagactgggaccccaagaagtatggcggattcgactcacccactgtggcatatagcgttctcgtggtggcaaaggttgaaaagggtaaatccaaaaaactcaaatccgtgaaggaactccttggcataactattatggaaaggagtagctttgaaaagaatcccatcgactttctcgaagctaagggctataaggaagttaagaaggaccttataatcaaacttccaaaatactccctttttgagttggaaaacggcagaaagagaatgttggccagtgccggggagcttcaaaagggcaacgaactggctctgcctagcaaatatgtgaactttttgtatctggcatcacactacgagaaacttaaaggctctcctgaggacaacgagcaaaaacagctctttgttgaacagcataagcactacctcgacgagattattgagcagatcagcgagttctcaaagagagttattctggctgacgctaatcttgacaaggttttgtccgcttacaacaaacacagggataagccaatcagggagcaggcagaaaacataatccatctctttaccctgacaaacctcggtgcccccgctgctttcaagtattttgatactaccattgacaggaagagatatacttccactaaggaagtgctcgacgcaaccctcatacaccaaagtatcacaggcctctatgaaactaggatagatttgtctcaacttgggggcgat

SEQ ID NO: 79 - DNA, 4101 bp, synthetic construct
  source 1..4101: mol_type = other DNA
gacaaaaagtattccatcgggcttgctatcggaaccaactctgtggggtgggcagttattaccgacgaatacaaggtgcccagcaagaagtttaaggttctggggaacacagatagacatagcataaagaaaaacctgataggcgcactgttgttcgactccggggaaacagccgaagctaccaggctgaagagaactgcaagaagaaggtacaccagaagaaaaaacagaatatgttatctccaagagattttctctaacgagatggccaaggtggacgactcattctttcacagactggaagaatctttccttgtggaagaagataagaaacacgagaggcaccctatttttggcaatatcgtggatgaggtggcttaccacgaaaaataccctacaatataccacctcaggaaaaaattggttgatagtacagacaaggccgacctcaggctcatctatttggccctggcccatatgattaaattcagggggcactttctcatcgagggagatttgaaccccgacaacagtgatgttgataagctctttattcagctcgtgcagacttacaatcagttgtttgaggaaaaccccattaatgcttccggggtggacgccaaggcaatcctttctgcaagactctcaaagtcaaggagactcgaaaatctgatagcacagcttccaggagagaagaagaacgggctctttggaaacctgatcgctctgtcactcggactcacacccaatttcaaaagcaattttgatttggcagaggacgctaagctgcaactcagtaaggatacctacgacgatgacttggataatctgctcgcacaaattggggaccagtatgcagacctgtttctcgcagctaagaacttgagtgacgccatattgctcagtgacatcctcagggttaataccgagattacaaaagctccactctctgcaagcatgatcaagaggtatgacgagcaccatcaagacctgacactccttaaggcgttggttaggcagcaacttcctgaaaagtataaggaaatcttcttcgatcaaagcaaaaacggctacgccggctatatagacgggggagcatcccaagaagaattttataagttcataaaacctatattggagaagatggacgggacagaggaattgctcgtgaaactgaacagggaggatctcctcaggaagcaaaggaccttcgacaatggctccatcccacatcagattcacctcggcgaactgcacgcaatactgagaagacaagaggacttttatcctttcctgaaggacaacagggagaaaatcgagaaaatcttgacattcagaatcccatactacgttgggcctctggccagaggtaacagtaggttcgcctggatgactaggaaatcagaggagactattacaccctggaactttgaagaagttgttgataagggagcttcagcacaatcattcatcgaaagaatgacaaactttgacaaaaatctgcctaatgagaaagtgctcccaaaacattccctgctgtatgagtattttaccgtttataacgagcttaccaaggtgaaatacgttactgaaggtatgagaaagccagcttttctttcaggggagcaaaagaaggctatcgtggatcttctctttaagaccaacagaaaggttaccgtgaagcagcttaaggaagactactttaaaaagatcgagtgttttgactcagtggaaataagcggtgttgaagatagattcaacgcatccttgggaacttatcatgatcttcttaagataatcaaggataaagactttctcgacaacgaggaaaacgaagatatactggaggacatagttctgacacttactttgttcgaggatagggagatgatcgaggaaagactgaaaacatatgctcaccttttcgacgacaaagttatgaaacaactcaagagaaggagatatacagggtgggggagattgagcaggaaactgattaatggtatcagagacaaacagtcaggaaaaacaatactcgactttttgaaatcagacgggttcgcaaataggaatttcatgcagcttatacacgacgattcacttacttttaaagaggacattcaaaaggctcaagttagtggacaaggtgactccctccacgaacacatcgcaaatctcgctggcagccctgcaattaagaagggtatactccagacagttaaggttgttgacgagctggttaaagtgatgggaagacacaaacccgagaacatagtgatagagatggccagggaaaaccaaaccactcaaaaagggcagaaaaattccagagagaggatgaaaaggattgaagaaggtatcaaggagctgggtagccaaattctgaaagaacatcctgtggaaaacactcaactccagaatgagaaactctatctgtactatctgcaaaatgggagagatatgtatgtggaccaggaactggacataaacaggctctcagattacgatgtggatcatatcgtgccacagtcctttcttaaggatgatagcatcgacaataaggtgcttaccaggtccgacaagaacaggggaaagtcagataacgtgccttctgaagaagttgttaaaaagatgaagaactactggagacagctgcttaacgctaagctcataacacagaggaagtttgacaacttgaccaaggccgagagaggcggactctcagaattggataaggcagggttcataaaaaggcagctggtggaaacaaggcagataactaaacatgtggctcagatcctcgatagtaggatgaatacaaaatacgatgagaacgacaagctcataagggaggttaaagtgataactctgaaatccaaactggttagcgattttaggaaggatttccagttttacaaagttagggagatcaacaattatcatcacgcccacgatgcctacttgaacgcagttgtgggtactgcacttatcaaaaagtaccctaagctggaatccgagtttgtttatggagactataaggtgtacgacgttagaaaaatgattgcaaagtcagagcaggagatagggaaagccactgcaaaatatttcttttatagcaatatcatgaatttctttaagacagaaatcacactggccaatggggaaataaggaagaggcccctgatcgaaactaatggcgagacaggggagattgtgtgggataaaggtagggactttgcaacagtgaggaaagtgctgagcatgccccaagttaatatcgttaaaaagaccgaggttcaaacagggggctttagtaaggaaagcattttgcccaagaggaatagtgacaaattgattgctaggaaaaaagattgggaccccaaaaagtatggcggatttgatagccccactgttgcttactccgtgctcgtggttgcaaaggtggagaagggaaagagcaagaaactgaagtcagttaaggaactccttggtatcactatcatggaaagaagctcctttgagaagaaccctattgacttcctggaggctaaagggtacaaagaggttaagaaagaccttatcattaaattgcccaaatatagtcttttcgagcttgaaaacggaagaaagaggatgcttgcatccgctggcgaattgcaaaagggcaatgagcttgctctcccttccaagtatgtgaacttcctttatcttgcctcacactatgaaaaactcaaaggttcacccgaagacaacgaacaaaagcaactatttgtggaacaacacaagcactacctggacgaaatcattgagcaaatttctgagttttcaaaaagggtaatcttggctgacgcaaatctcgacaaagttttgtcagcttacaacaaacatagagataagccaattagagagcaagctgagaatatcatccatctgtttaccctgactaaccttggagcgcctgctgcttttaaatatttcgacaccacaatcgacaggaagaggtacactagcactaaggaagttctcgacgccaccctcatccaccagagtattacaggcctgtacgagacaagaattgatctttctcaacttggtggtgac

SEQ ID NO: 80 - DNA, 4101 bp, synthetic construct
  source 1..4101: mol_type = other DNA
gataagaagtactcaatcggtctggcaatcggaaccaactctgtgggttgggcagtgattacagatgagtataaggtgccaagcaaaaaattcaaggtgctgggtaataccgacagacacagcattaagaagaatttgattggagcactcctctttgactcaggggaaacagcagaggcaacaaggctgaagaggacagcaaggcggaggtacacaaggcggaaaaacaggatatgctacctccaggaaatctttagcaacgagatggctaaagtggatgatagctttttccatagactcgaagaatcctttcttgttgaagaggacaaaaagcatgaaaggcatcccatcttcggcaatatagttgatgaggttgcataccatgagaagtaccccacaatctaccacctcagaaagaaacttgtggactccacagataaagcagacctgaggctcatatacctcgcactcgcacacatgatcaagttcagagggcactttctcatcgaaggtgacctgaatccagataattcagatgtggataaactgtttatacagctggtgcaaacatacaaccaacttttcgaggaaaacccaatcaatgcctccggtgttgatgcaaaggccatcctgtcagcaagactcagcaaaagcaggcggctcgaaaacctcatcgcccagcttcccggtgaaaagaagaacgggctctttggtaatctcatcgcattgagccttggtcttactccaaacttcaagagcaattttgatctggcagaggatgctaaactgcaactctcaaaggacacatatgacgatgaccttgacaatctgttggcccagatcggggaccaatatgcagacctcttcctggccgcaaagaatctgtcagatgcaatcctcttgtccgacatactgagagttaacactgagatcacaaaggcacctctgtccgcctccatgattaagagatacgatgagcatcaccaggatctgactttgctcaaagccctcgttagacagcagttgccagaaaagtacaaagaaatattctttgatcaatcaaaaaacggatatgcagggtacatcgacggtggggcaagccaggaagagttctacaaattcatcaaacctatcctggaaaagatggatgggacagaagagctgctggttaagctgaatagggaagacctcctcagaaagcagaggacatttgataacgggagcatccctcatcaaatccacctcggtgaactccatgctatcctgagaaggcaggaagacttttatccatttttgaaggacaatagggagaaaatcgaaaaaatcctgacattcagaatcccatactacgttggtcctctggcaagaggtaacagtaggttcgcatggatgacaaggaaaagcgaggagacaatcacaccctggaattttgaggaagttgttgacaagggtgccagcgcacaatcctttatcgaaagaatgacaaatttcgacaagaatctgcctaacgaaaaggttctcccaaagcattcactcctgtacgaatattttacagtttataacgaactgactaaagttaaatacgttaccgagggtatgaggaagccagcattcctttccggggaacagaagaaagctattgtggacctcctgttcaagacaaatagaaaagtgacagttaagcaactcaaagaggattacttcaaaaagatcgaatgttttgactctgtggagatcagcggggtggaggatagattcaacgccagcctgggtacatatcatgatctcctgaaaatcattaaagacaaggacttccttgacaacgaggagaacgaggacattctggaagacattgttctgaccctcacactctttgaggatagggagatgattgaggaaagactgaagacctacgcccacctctttgacgataaagtgatgaaacagctcaagagaagaaggtatacaggttgggggagactgagcaggaagttgatcaatgggattagggacaaacagtccgggaaaacaatcctcgattttctgaagtcagacggtttcgcaaacagaaattttatgcagctcattcacgatgacagcttgacattcaaggaagacatccaaaaggctcaagtgagcggccaaggggatagcctccacgagcatattgcaaatctggcaggttcaccagccatcaaaaagggcatacttcagacagttaaggttgtggacgaattggttaaagttatgggcaggcataagccagagaatatcgttatcgaaatggcaagggagaaccaaacaactcaaaaagggcagaaaaatagcagagagaggatgaaaagaatcgaggaagggatcaaggaacttgggtcccaaatcctcaaggagcacccagttgaaaatactcaactgcaaaacgagaagctctatctctactatctccaaaacgggagggatatgtatgttgaccaggagctggatattaacagactgtcagattatgatgttgatcatatcgtgccccagtcattcctgaaggacgattccatcgacaacaaagttctcacaaggtccgataaaaacaggggcaagtccgataacgttccaagcgaagaagtggtgaaaaagatgaaaaactattggagacaacttctgaatgcaaagttgattactcagagaaagtttgacaacctcacaaaagcagaaagaggcgggcttagcgaactcgataaggcagggtttatcaaaagacagctggttgagacaaggcagatcacaaaacatgtggcacagatccttgactcaaggatgaataccaagtatgatgagaatgataagttgatcagggaggttaaagttatcacactcaaatccaaactggtgtcagacttcaggaaagactttcaattttataaggtgagggagatcaataactaccaccatgcacatgacgcctacctgaacgcagtggtgggtacagcattgattaaaaaataccctaagctggagtctgagtttgtgtacggggactacaaggtgtacgacgtgaggaaaatgatagccaagtccgagcaggagatcgggaaagcaacagctaagtatttcttttacagtaatatcatgaatttctttaaaactgagattactctggcaaacggggagatcaggaaaagacccctcatcgagactaatggtgaaacaggtgagatcgtttgggacaaggggagggattttgctactgttagaaaagttctgagtatgccacaagtgaatattgtgaaaaagacagaagttcagacaggtgggttctccaaagaatccatcctgcccaagagaaattcagacaagctcatcgcaagaaagaaggactgggaccctaagaagtacggaggatttgacagccccaccgtggcctattccgtgcttgttgtggcaaaggtggagaaagggaagagcaaaaaactgaaatccgtgaaagaactgctgggaattaccatcatggaaagaagctcctttgagaagaacccaatcgacttcctggaagcaaaaggatataaggaagtgaaaaaggacctcattatcaagctcccaaaatactcacttttcgagttggagaacggtagaaagaggatgctggcaagcgcaggggaacttcagaaaggcaatgagctggcattgccatcaaagtatgtgaacttcctctacttggccagccattacgagaaacttaaaggtagcccagaagataacgagcaaaaacagctctttgtggaacagcataagcattatctggatgagatcatagaacaaatctcagagttttccaagagagttatcctcgcagatgcaaacctggataaggttctctcagcctataataagcatagagacaagccaattagagagcaagcagagaacattatccacttgttcactcttacaaacctgggggcaccagccgccttcaaatatttcgatacaacaatagacagaaagaggtataccagcaccaaagaagttctcgacgccacactgatccatcaatcaatcacaggcctttacgaaactaggatcgacttgtcacaactgggtggggat

SEQ ID NO: 81 - DNA, 3307 bp, synthetic construct
  source 1..3307: mol_type = other DNA
gagcaaggacacctacgacgacgacttggacaacctattggcccagataggtgaccagtatgcagacctcttccttgcggccaagaacttgagtgacgctatactgctcagtgacatcctgagggtgaacactgagatcactaaggcccctctctctgcctcaatgattaagcgttacgacgagcatcaccaggatctcaccctgcttaaggcccttgttcggcagcagctccctgagaagtacaaggagatattttttgaccagtctaagaacggctacgccggttacattgacggtggggcaagccaggaggagttctacaagttcatcaagccgatccttgagaagatggacggcaccgaggagctacttgtcaagttgaaccgggaagacctgctccggaaacagcgtacattcgacaacggcagcatccctcaccagatccacctgggcgaactacacgccatcctccgacgtcaggaggacttctatccattcttgaaagataacagggaaaaaatcgaaaaaatacttacgtttcgaataccttactacgtggggccccttgctcggggaaactccagattcgcatggatgaccaggaagtcagaggagaccatcacaccctggaactttgaggaggtggttgacaaaggtgcttctgcccagtccttcattgagcggatgactaacttcgacaagaacctgcccaacgagaaggtgctgccaaagcacagcctgctctacgaatactttactgtgtacaatgagctgacgaaggtgaagtacgtgacagaggggatgcggaagcccgctttcctgagcggcgagcaaaaaaaagcaatcgtggacctactgttcaagaccaaccgaaaggtgacagtgaagcagctcaaggaggactacttcaaaaaaatcgagtgcttcgactctgttgagataagcggcgtggaggaccgattcaacgcctcattgggaacctatcacgacctgctcaagatcattaaggacaaggacttcctggataatgaggagaatgaggacatcctggaggatattgtgctgacccttactctattcgaggacagggagatgatcgaggagcgactcaagacctacgctcacctgttcgacgacaaggttatgaagcaattgaagcgtaggcgatacacggggtggggaagactctcccgaaaactgataaacggcatcagggacaagcagtcagggaagacgatcttggacttcctgaaatccgacgggttcgccaaccgcaacttcatgcagctcattcacgacgactcactaacgttcaaagaggacattcagaaggctcaagtcagtggacaaggcgactccctgcacgagcacattgcaaaccttgcgggctccccggcgattaaaaagggcattctccaaacggttaaggtggtggacgagctggtgaaggtgatgggccgacacaagcctgagaacatcgtgatcgagatggccagggagaaccagactacccagaagggtcagaagaactctcgggaacgtatgaagcgtattgaggaggggattaaggagttgggctctcaaatcctcaaggagcaccctgtggagaacactcagctccaaaacgagaagctgtacctgtactacctgcaaaacgggcgcgatatgtacgtggatcaggagttggacatcaacaggcttagcgattacgacgtggaccacatcgtgccacagtcattcttaaaggacgacagcatcgacaacaaggttctgacgaggagcgacaagaatcgagggaaaagtgacaatgttccatccgaggaggtggtcaagaaaatgaagaactattggcgtcagcttctgaacgccaagctcatcacccagcggaaattcgacaacctgactaaggctgagcgaggcggactctccgagcttgacaaggctggcttcatcaagcggcagttggtcgaaacccgacagataacgaagcacgttgcccagatacttgactcccgtatgaacaccaagtacgacgagaacgacaagctcatcagggaggtgaaggtcattacccttaagtccaaactcgtcagcgactttcgtaaggacttccagttctacaaggtgcgcgagatcaataactaccaccacgcacacgacgcctacctgaacgcagtggttggaaccgcgttgattaaaaagtaccccaagttggagtcggagttcgtttacggggactacaaggtgtacgacgttcggaagatgatcgccaagtctgaacaggagatcgggaaagcaaccgccaagtatttcttctatagcaacatcatgaacttctttaaaaccgagatcacacttgccaatggcgagatccgtaagaggccgctgatcgagacaaatggggagactggcgagatcgtgtgggacaagggccgcgacttcgcaaccgttcggaaagtcttgtccatgcctcaagtcaacatcgtcaagaagactgaggtgcaaacaggcgggttctcgaaggagtccatactgcccaagaggaactcagacaagctcatagcacgcaaaaaagactgggatccaaagaaatacggcgggttcgactcgccgacagtcgcatactccgtgttagtggtggctaaagtggaaaaggggaagtccaagaagctcaagtccgtcaaggagttgctcgggatcaccattatggaacggtcctcattcgagaagaatcccattgacttcctagaggcgaagggctacaaagaggtcaaaaaggacctaattattaagctccccaagtattcactcttcgaacttgaaaatggtcgtaagcggatgttggcaagcgctggagagcttcagaaggggaacgagcttgcactgccttccaagtacgtgaacttcctgtacctcgcctctcattacgagaagttgaagggctcaccggaggacaacgagcagaagcagttgttcgtggagcagcacaagcactacctcgacgagatcattgagcagataagtgagttcagcaaacgggtgatccttgccgacgctaacctggacaaggtgctgagcgcctacaacaagcacagagacaagccgatccgagagcaagcggagaacatcatacacctgttcaccctcacgaacctcggggctcccgcagccttcaaatattttgacacgaccatcgaccgtaaacgctacactagcacgaaggaggtgctggacgctacccttatccaccagtccatcaccggcctgtacgagacgagaatcgacttgtcgcagctcggtggtgac

SEQ ID NO: 82 - DNA, 4101 bp, synthetic construct
  source 1..4101: mol_type = other DNA
gacaaaaaatactcaattggtctggcaattgggaccaacagtgtcggatgggccgtgattaccgacgagtacaaggtgccgtccaaaaaattcaaggtgcttgggaacaccgaccgccactcgatcaagaaaaacctaatcggtgcgttgcttttcgacagtggggagaccgccgaggcaacacgcttaaaacgcacagctaggaggagatatacacggcgcaagaaccgaatatgctacttacaggagatattctccaatgagatggcgaaggtggacgactctttcttccatcggcttgaggaatccttcctggtcgaggaggacaagaagcacgagcgacacccgatattcgggaacatcgttgatgaggtggcgtaccacgagaagtacccaacgatataccacttacgcaagaagctcgtggactctacggacaaggccgacttgcgccttatctacttggcactggcccacatgattaagttccgaggccacttccttatcgagggtgacctgaaccccgataactccgacgtggacaagctcttcatccaactcgtccagacatacaaccagctattcgaggagaatcctatcaacgcctctggggtggacgctaaagctatcctctcagcccgcctgtcaaagtcgaggaggttggagaacctaatcgcccagcttccaggcgagaagaaaaatgggctgttcggaaaccttatcgcactctcactgggcctaaccccgaacttcaagtccaacttcgacctggcagaggacgcgaaattgcagttgtcgaaagacacctatgacgatgacctggacaacctgttggcccagataggggaccagtacgccgacctgttcctagcggccaagaacctgtccgacgccatcttgctgtcggatatactgcgggtgaacaccgagatcactaaagcacctctctccgccagcatgattaagcgttacgacgagcaccaccaagatttgaccctgctaaaggcacttgtacggcagcagcttcccgagaagtacaaggagatctttttcgaccaaagcaagaacggctacgccgggtacatcgacggaggtgccagccaggaggagttctacaagttcattaagcccatcctggagaagatggacgggactgaggaactacttgtgaagctgaaccgggaagacttactacggaagcagcgtaccttcgacaacggttctatcccacatcagatccatcttggggagttgcacgcgatcctgcgacgccaggaggacttttaccccttcctgaaagacaaccgcgagaaaatcgagaagatactgaccttcagaataccttactacgtcggaccccttgcgcgaggcaactcaagattcgcgtggatgaccaggaaatcagaggagaccatcacaccctggaatttcgaggaggtggttgacaagggtgcctccgcccagtcctttatcgaacgaatgaccaacttcgacaagaacttgcccaacgagaaggtgctccccaaacacagcctcctctacgaatatttcacagtgtacaacgagcttactaaagttaagtatgttactgagggcatgaggaaacccgccttcctgtcaggcgagcagaagaaagctattgtggacctccttttcaagaccaaccggaaggtgacagtgaagcagctcaaggaggactacttcaagaagatagagtgcttcgacagcgtggagatcagcggggtggaggacagattcaatgcctctctcggaacataccacgacttgcttaagatcatcaaggacaaggacttcctcgacaacgaggaaaacgaggatattctggaggatattgttctgactcttaccctgttcgaggaccgggagatgatcgaggagcgtctcaagacctacgcccacctgttcgacgacaaagttatgaagcagctcaagcgtcggagatataccggatggggccgtctgtctcggaagctcatcaacgggatcagggacaagcagtcagggaagacgatcttagacttccttaagtctgacggcttcgccaacaggaacttcatgcagttgatccacgacgacagccttaccttcaaggaggacatccagaaggcccaagtgagtggccagggtgacagcctccacgagcatattgctaatcttgcgggttccccagcgattaaaaagggcatacttcaaaccgttaaggtggtggacgagcttgtcaaggtgatggggcgacacaagcccgagaacatcgtgatcgagatggccagggagaaccagaccacccagaaggggcagaagaatagccgagaacgcatgaagcgcatcgaggaggggattaaggagctagggagccagatcctcaaggaacatcccgtcgagaacacccagctccagaacgagaagctatacctctactacttgcaaaacgggagggatatgtacgtggatcaggagttggacattaaccgcctaagcgactacgacgtagatcacatcgtgcctcagtcattcctcaaagacgacagcattgacaacaaagtcttgacccgatccgacaagaaccgaggaaaatccgacaatgtgccctcagaggaggtcgtcaagaaaatgaagaactattggaggcagctacttaacgccaaactcataacccagcggaagttcgacaacctgacaaaggctgagcggggtgggctcagcgagcttgacaaggctggcttcatcaagcggcagttggtggagacaagacagataacgaagcacgtggctcagatcctggactctcgcatgaacacgaagtacgacgagaacgacaaattgatccgcgaggtcaaggttattacgctcaagagcaaacttgtcagcgatttccgcaaggacttccagttctacaaggtgagggagattaacaactaccaccatgcacatgatgcctacttgaacgcagtggtggggaccgcgcttattaaaaagtaccctaagttggagtcagagttcgtttatggggactacaaggtgtacgacgtccggaagatgattgcaaagtctgaacaggaaatcgggaaggccaccgccaaatatttcttctacagtaacattatgaatttttttaagactgaaattactctcgcaaacggcgagatcaggaagcgtcccctcatcgagacaaacggggagaccggggagatagtctgggacaaggggcgggacttcgctacggtgaggaaggtgctctcgatgccacaagtgaacatcgtcaaaaagacagaggtgcagaccggtggcttctcaaaggagtcaatcctgccaaaacgtaacagcgacaagctcatcgcccgcaagaaagactgggaccctaagaagtatggtgggttcgactcaccgacggtcgcatactccgttctggtcgtggcaaaggtggaaaagggcaagtccaaaaaactgaaatccgtgaaggagttgcttggcattaccatcatggaacgcagcagcttcgagaagaaccccattgacttcctggaggctaaagggtacaaggaggtcaagaaagatttaattattaagctacctaagtacagcttgttcgagctggagaacggccgaaaacgaatgctcgcatccgccggggaacttcaaaagggcaacgagcttgcgctgccctccaagtacgtgaacttcctgtacttggcatcccactacgagaaactcaagggtagcccagaggacaacgagcagaagcagctattcgtggagcagcacaagcactacctcgacgagataatcgagcagatcagtgagttcagtaagcgggtgatactcgcggacgccaacttggacaaggtgcttagtgcctacaacaagcaccgtgacaagcccatccgagaacaggctgagaacatcatccaccttttcactctgacaaacctcggtgctcccgccgccttcaaatacttcgacactaccatcgacaggaagcgctacacatctacgaaggaagttcttgacgctacgcttattcatcagtctatcacagggctgtacgagacaaggatcgaccttagccaactcggcggggat

SEQ ID NO: 83 - DNA, 4101 bp, synthetic construct
  source 1..4101: mol_type = other DNA
gacaagaagtacagcatcgggctggcgatcgggaccaactccgtcggctgggctgtgattaccgacgagtacaaggtgccatccaagaagttcaaggtcctcggcaacactgaccggcacagcattaagaagaacctgattggggcgctgctgttcgattcgggggagactgcggaggcgaccaggctgaagcggactgcgcgccggaggtacaccaggaggaagaatcggatctgctacctccaggagattttctcgaatgagatggccaaggtggacgattccttcttccatcgcctggaggagtcgttcctcgttgaggaggacaagaagcatgagaggcatcccattttcgggaatatcgttgacgaggtggcttaccatgagaagtacccgaccatctaccatctgcggaagaagctcgtcgattcgaccgataaggccgacctgcggctgatctacctggccctcgcgcacatgattaagttccggggccatttcctcatcgagggcgacctcaacccggacaactcggacgtggataagctcttcattcagctcgtgcagacatacaaccagctcttcgaggagaatcccattaacgcctcgggggtcgacgctaaggctattctctcggctcggctgtcgaagtcgcgccggctggagaatctcattgcccagctcccaggcgagaagaagaacggcctcttcggcaacctgattgccctgtcgctggggctcacaccgaatttcaagtcgaacttcgacctcgccgaggacgctaagctccagctcagcaaggatacttacgatgatgacctcgataacctgctcgcccagattggggatcagtacgcggatctgttcctcgcggccaagaatctcagcgatgctattctcctgtcggacattctccgcgtcaacacagagattactaaggccccactgtcggcgagcatgattaagaggtacgatgagcatcatcaggacctgacactgctcaaggcgctggtccggcagcagctccccgagaagtacaaggagattttcttcgatcagtcaaagaatgggtacgcgggctacattgatggcggcgcgtcccaggaggagttctacaagttcattaagcccatcctggagaagatggacgggaccgaggagctgctggtgaagctcaatcgggaggacctgctccggaagcagcgcacattcgacaatggctcgattcctcaccagattcacctgggcgagctgcacgccattctccgcaggcaggaggacttctacccgttcctcaaggacaaccgcgagaagatcgagaagatcctgaccttccggattccatactacgtggggccgctcgcgcgggggaactcccggttcgcgtggatgactcgcaagtccgaagaaacgattacaccgtggaatttcgaggaggtcgtcgacaagggcgctagtgcgcagtcattcattgagaggatgaccaatttcgataagaacctgcctaacgagaaggtgctgccgaagcattcgctgctctacgagtacttcaccgtttacaatgagctgaccaaggtgaagtatgtgactgagggcatgaggaagccagcgttcctgagcggcgagcagaagaaggctatcgtggacctgctcttcaagactaaccggaaggtgactgtgaagcagctcaaggaggactacttcaagaagattgagtgcttcgattccgttgagattagcggggtggaggatcggttcaatgcttcgctcgggacataccacgatctcctgaagatcattaaggataaggacttcctcgacaacgaggagaacgaggacattctcgaagatattgtcctgaccctcaccctcttcgaggatcgggagatgatcgaggagaggctcaagacatacgctcatctgttcgatgataaggtcatgaagcagctgaagcgcaggcggtacacagggtgggggcggctgagccggaagctgatcaacgggattcgggataagcagtccgggaagacaattctcgacttcctcaagtccgacgggttcgctaaccggaacttcatgcagctcattcatgatgactcgctgacattcaaggaggatattcagaaggcgcaggtttcggggcagggcgactcgctccacgagcatattgcgaatctggcgggctcccccgcgattaagaagggcattctgcaaaccgtcaaggtggttgatgagctggtcaaggtcatggggcggcataagccagagaatattgtcatcgagatggcgcgggagaatcagaccacacagaaggggcagaagaactcacgggagcggatgaagcgcatcgaggagggcatcaaggagctggggtcgcagatcctgaaggagcatcccgtggagaacactcagctgcaaaatgagaagctgtacctctactacctccagaacgggagggacatgtatgtggatcaggagctggatattaataggctgagcgattacgatgtcgaccacattgtcccacagtcgttcctgaaggacgacagcattgacaacaaggtgctgacccgctcggataagaacaggggcaagagcgataatgttccaagcgaggaggttgtgaagaagatgaagaactactggcggcagctcctgaacgcgaagctcatcacacagcggaagttcgacaacctcaccaaggctgagcgcgggggcctgagcgagctggacaaggcggggttcattaagaggcagctggtcgagacacggcagattacaaagcatgttgcgcagattctcgattcccggatgaacaccaagtacgatgagaacgataagctgattcgggaggtcaaggtaattaccctgaagtccaagctggtgtccgacttcaggaaggacttccagttctacaaggttcgggagatcaacaactaccaccacgcgcatgatgcctacctcaacgcggtcgtggggaccgctctcatcaagaagtacccaaagctggagtcagagttcgtctacggggattacaaggtttacgacgtgcggaagatgatcgctaagagcgagcaggagattggcaaggctaccgctaagtacttcttctactccaacatcatgaacttcttcaagacagagattaccctcgcgaatggcgagatccggaagaggcccctcatcgagacaaatggggagacaggggagattgtctgggataaggggcgggatttcgcgaccgtccggaaggtcctgtcgatgccccaggttaatattgtcaagaagactgaggtccagactggcggcttctcaaaggagtcgattctcccaaagaggaactccgataagctcattgctcggaagaaggattgggaccccaagaagtacgggggattcgactcccccactgttgcttactctgttctggttgttgctaaggtggagaaggggaagtcgaagaagctgaagagcgtgaaggagctgctcgggattacaattatggagaggtcatccttcgagaagaatcccatcgacttcctggaggccaagggctacaaggaggtgaagaaggacctgattattaagctgcccaagtactcgctcttcgagctggagaatgggcggaagcggatgctggcgtccgcgggggagctgcaaaaggggaacgagctggcgctcccctccaagtatgtgaacttcctctacctggcgtcgcactacgagaagctgaaggggtccccagaggataatgagcagaagcagctcttcgtcgagcagcataagcactacctggacgagattatcgagcagattagcgagttctcgaagcgggtcatcctcgcggatgcgaacctggataaggtgctcagcgcctacaataagcaccgggacaagccgattcgggagcaggcggagaatattattcacctcttcacactcaccaacctcggggcaccagctgcgttcaagtacttcgacactactatcgaccggaagcggtacacctcgacgaaggaggtgctcgacgccaccctcattcaccagtcgatcacaggcctgtacgagacacggattgacctgtcccagctcgggggcgac

SEQ ID NO: 84 - DNA, 4101 bp, synthetic construct
  source 1..4101: mol_type = other DNA
gacaagaagtacagcatcggcctggacatcggcaccaactctgtgggctgggccgtgatcaccgacgagtacaaggtgcccagcaagaaattcaaggtgctgggcaacaccgaccggcacagcatcaagaagaacctgatcggagccctgctgttcgacagcggcgaaacagccgaggccacccggctgaagagaaccgccagaagaagatacaccagacggaagaaccggatctgctatctgcaagagatcttcagcaacgagatggccaaggtggacgacagcttcttccacagactggaagagtccttcctggtggaagaggataagaagcacgagcggcaccccatcttcggcaacatcgtggacgaggtggcctaccacgagaagtaccccaccatctaccacctgagaaagaaactggtggacagcaccgacaaggccgacctgcggctgatctatctggccctggcccacatgatcaagttccggggccacttcctgatcgagggcgacctgaaccccgacaacagcgacgtggacaagctgttcatccagctggtgcagacctacaaccagctgttcgaggaaaaccccatcaacgccagcggcgtggacgccaaggccatcctgtctgccagactgagcaagagcagacggctggaaaatctgatcgcccagctgcccggcgagaagaagaatggcctgttcggaaacctgattgccctgagcctgggcctgacccccaacttcaagagcaacttcgacctggccgaggatgccaaactgcagctgagcaaggacacctacgacgacgacctggacaacctgctggcccagatcggcgaccagtacgccgacctgtttctggccgccaagaacctgtccgacgccatcctgctgagcgacatcctgagagtgaacaccgagatcaccaaggcccccctgagcgcctctatgatcaagagatacgacgagcaccaccaggacctgaccctgctgaaagctctcgtgcggcagcagctgcctgagaagtacaaagagattttcttcgaccagagcaagaacggctacgccggctacattgacggcggagccagccaggaagagttctacaagttcatcaagcccatcctggaaaagatggacggcaccgaggaactgctcgtgaagctgaacagagaggacctgctgcggaagcagcggaccttcgacaacggcagcatcccccaccagatccacctgggagagctgcacgccattctgcggcggcaggaagatttttacccattcctgaaggacaaccgggaaaagatcgagaagatcctgaccttccgcatcccctactacgtgggccctctggccaggggaaacagcagattcgcctggatgaccagaaagagcgaggaaaccatcaccccctggaacttcgaggaagtggtggacaagggcgcttccgcccagagcttcatcgagcggatgaccaacttcgataagaacctgcccaacgagaaggtgctgcccaagcacagcctgctgtacgagtacttcaccgtgtataacgagctgaccaaagtgaaatacgtgaccgagggaatgagaaagcccgccttcctgagcggcgagcagaaaaaggccatcgtggacctgctgttcaagaccaaccggaaagtgaccgtgaagcagctgaaagaggactacttcaagaaaatcgagtgcttcgactccgtggaaatctccggcgtggaagatcggttcaacgcctccctgggcacataccacgatctgctgaaaattatcaaggacaaggacttcctggacaatgaggaaaacgaggacattctggaagatatcgtgctgaccctgacactgtttgaggacagagagatgatcgaggaacggctgaaaacctatgcccacctgttcgacgacaaagtgatgaagcagctgaagcggcggagatacaccggctggggcaggctgagccggaagctgatcaacggcatccgggacaagcagtccggcaagacaatcctggatttcctgaagtccgacggcttcgccaacagaaacttcatgcagctgatccacgacgacagcctgacctttaaagaggacatccagaaagcccaggtgtccggccagggcgatagcctgcacgagcacattgccaatctggccggcagccccgccattaagaagggcatcctgcagacagtgaaggtggtggacgagctcgtgaaagtgatgggccggcacaagcccgagaacatcgtgatcgaaatggccagagagaaccagaccacccagaagggacagaagaacagccgcgagagaatgaagcggatcgaagagggcatcaaagagctgggcagccagatcctgaaagaacaccccgtggaaaacacccagctgcagaacgagaagctgtacctgtactacctgcagaatgggcgggatatgtacgtggaccaggaactggacatcaaccggctgtccgactacgatgtggaccatatcgtgcctcagagctttctgaaggacgactccatcgacaacaaggtgctgaccagaagcgacaagaaccggggcaagagcgacaacgtgccctccgaagaggtcgtgaagaagatgaagaactactggcggcagctgctgaacgccaagctgattacccagagaaagttcgacaatctgaccaaggccgagagaggcggcctgagcgaactggataaggccggcttcatcaagagacagctggtggaaacccggcagatcacaaagcacgtggcacagatcctggactcccggatgaacactaagtacgacgagaatgacaagctgatccgggaagtgaaagtgatcaccctgaagtccaagctggtgtccgatttccggaaggatttccagttttacaaagtgcgcgagatcaacaactaccaccacgcccacgacgcctacctgaacgccgtcgtgggaaccgccctgatcaaaaagtaccctaagctggaaagcgagttcgtgtacggcgactacaaggtgtacgacgtgcggaagatgatcgccaagagcgagcaggaaatcggcaaggctaccgccaagtacttcttctacagcaacatcatgaactttttcaagaccgagattaccctggccaacggcgagatccggaagcggcctctgatcgagacaaacggcgaaaccggggagatcgtgtgggataagggccgggattttgccaccgtgcggaaagtgctgagcatgccccaagtgaatatcgtgaaaaagaccgaggtgcagacaggcggcttcagcaaagagtctatcctgcccaagaggaacagcgataagctgatcgccagaaagaaggactgggaccctaagaagtacggcggcttcgacagccccaccgtggcctattctgtgctggtggtggccaaagtggaaaagggcaagtccaagaaactgaagagtgtgaaagagctgctggggatcaccatcatggaaagaagcagcttcgagaagaatcccatcgactttctggaagccaagggctacaaagaagtgaaaaaggacctgatcatcaagctgcctaagtactccctgttcgagctggaaaacggccggaagagaatgctggcctctgccggcgaactgcagaagggaaacgaactggccctgccctccaaatatgtgaacttcctgtacctggccagccactatgagaagctgaagggctcccccgaggataatgagcagaaacagctgtttgtggaacagcacaagcactacctggacgagatcatcgagcagatcagcgagttctccaagagagtgatcctggccgacgctaatctggacaaagtgctgtccgcctacaacaagcaccgggataagcccatcagagagcaggccgagaatatcatccacctgtttaccctgaccaatctgggagcccctgccgccttcaagtactttgacaccaccatcgaccggaagaggtacaccagcaccaaagaggtgctggacgccaccctgatccaccagagcatcaccggcctgtacgagacacggatcgacctgtctcagctgggaggtgac

SEQ ID NO: 85 - DNA, 4101 bp, synthetic construct
  source 1..4101: mol_type = other DNA
gacaagaagtacagcatcggcctggacatcggcaccaactctgtgggctgggccgtgatcaccgacgagtacaaggtgcccagcaagaaattcaaggtgctgggcaacaccgaccggcacagcatcaagaagaacctgatcggagccctgctgttcgacagcggcgaaacagccgaggccacccggctgaagagaaccgccagaagaagatacaccagacggaagaaccggatctgctatctgcaagagatcttcagcaacgagatggccaaggtggacgacagcttcttccacagactggaagagtccttcctggtggaagaggataagaagcacgagcggcaccccatcttcggcaacatcgtggacgaggtggcctaccacgagaagtaccccaccatctaccacctgagaaagaaactggtggacagcaccgacaaggccgacctgcggctgatctatctggccctggcccacatgatcaagttccggggccacttcctgatcgagggcgacctgaaccccgacaacagcgacgtggacaagctgttcatccagctggtgcagacctacaaccagctgttcgaggaaaaccccatcaacgccagcggcgtggacgccaaggccatcctgtctgccagactgagcaagagcagacggctggaaaatctgatcgcccagctgcccggcgagaagaagaatggcctgttcggaaacctgattgccctgagcctgggcctgacccccaacttcaagagcaacttcgacctggccgaggatgccaaactgcagctgagcaaggacacctacgacgacgacctggacaacctgctggcccagatcggcgaccagtacgccgacctgtttctggccgccaagaacctgtccgacgccatcctgctgagcgacatcctgagagtgaacaccgagatcaccaaggcccccctgagcgcctctatgatcaagagatacgacgagcaccaccaggacctgaccctgctgaaagctctcgtgcggcagcagctgcctgagaagtacaaagagattttcttcgaccagagcaagaacggctacgccggctacattgacggcggagccagccaggaagagttctacaagttcatcaagcccatcctggaaaagatggacggcaccgaggaactgctcgtgaagctgaacagagaggacctgctgcggaagcagcggaccttcgacaacggcagcatcccccaccagatccacctgggagagctgcacgccattctgcggcggcaggaagatttttacccattcctgaaggacaaccgggaaaagatcgagaagatcctgaccttccgcatcccctactacgtgggccctctggccaggggaaacagcagattcgcctggatgaccagaaagagcgaggaaaccatcaccccctggaacttcgaggaagtggtggacaagggcgcttccgcccagagcttcatcgagcggatgaccaacttcgataagaacctgcccaacgagaaggtgctgcccaagcacagcctgctgtacgagtacttcaccgtgtataacgagctgaccaaagtgaaatacgtgaccgagggaatgagaaagcccgccttcctgagcggcgagcagaaaaaggccatcgtggacctgctgttcaagaccaaccggaaagtgaccgtgaagcagctgaaagaggactacttcaagaaaatcgagtgcttcgactccgtggaaatctccggcgtggaagatcggttcaacgcctccctgggcacataccacgatctgctgaaaattatcaaggacaaggacttcctggacaatgaggaaaacgaggacattctggaagatatcgtgctgaccctgacactgtttgaggacagagagatgatcgaggaacggctgaaaacctatgcccacctgttcgacgacaaagtgatgaagcagctgaagcggcggagatacaccggctggggcaggctgagccggaagctgatcaacggcatccgggacaagcagtccggcaagacaatcctggatttcctgaagtccgacggcttcgccaacagaaacttcatgcagctgatccacgacgacagcctgacctttaaagaggacatccagaaagcccaggtgtccggccagggcgatagcctgcacgagcacattgccaatctggccggcagccccgccattaagaagggcatcctgcagacagtgaaggtggtggacgagctcgtgaaagtgatgggccggcacaagcccgagaacatcgtgatcgaaatggccagagagaaccagaccacccagaagggacagaagaacagccgcgagagaatgaagcggatcgaagagggcatcaaagagctgggcagccagatcctgaaagaacaccccgtggaaaacacccagctgcagaacgagaagctgtacctgtactacctgcagaatgggcgggatatgtacgtggaccaggaactggacatcaaccggctgtccgactacgatgtggaccatatcgtgcctcagagctttctggccgacgactccatcgacaacaaggtgctgaccagaagcgacaagaaccggggcaagagcgacaacgtgccctccgaagaggtcgtgaagaagatgaagaactactggcggcagctgctgaacgccaagctgattacccagagaaagttcgacaatctgaccaaggccgagagaggcggcctgagcgaactggataaggccggcttcatcaagagacagctggtggaaacccggcagatcacaaagcacgtggcacagatcctggactcccggatgaacactaagtacgacgagaatgacaagctgatccgggaagtgaaagtgatcaccctgaagtccaagctggtgtccgatttccggaaggatttccagttttacaaagtgcgcgagatcaacaactaccaccacgcccacgacgcctacctgaacgccgtcgtgggaaccgccctgatcaaaaagtaccctgccctggaaagcgagttcgtgtacggcgactacaaggtgtacgacgtgcggaagatgatcgccaagagcgagcaggaaatcggcaaggctaccgccaagtacttcttctacagcaacatcatgaactttttcaagaccgagattaccctggccaacggcgagatccggaaggcccctctgatcgagacaaacggcgaaaccggggagatcgtgtgggataagggccgggattttgccaccgtgcggaaagtgctgagcatgccccaagtgaatatcgtgaaaaagaccgaggtgcagacaggcggcttcagcaaagagtctatcctgcccaagaggaacagcgataagctgatcgccagaaagaaggactgggaccctaagaagtacggcggcttcgacagccccaccgtggcctattctgtgctggtggtggccaaagtggaaaagggcaagtccaagaaactgaagagtgtgaaagagctgctggggatcaccatcatggaaagaagcagcttcgagaagaatcccatcgactttctggaagccaagggctacaaagaagtgaaaaaggacctgatcatcaagctgcctaagtactccctgttcgagctggaaaacggccggaagagaatgctggcctctgccggcgaactgcagaagggaaacgaactggccctgccctccaaatatgtgaacttcctgtacctggccagccactatgagaagctgaagggctcccccgaggataatgagcagaaacagctgtttgtggaacagcacaagcactacctggacgagatcatcgagcagatcagcgagttctccaagagagtgatcctggccgacgctaatctggacaaagtgctgtccgcctacaacaagcaccgggataagcccatcagagagcaggccgagaatatcatccacctgtttaccctgaccaatctgggagcccctgccgccttcaagtactttgacaccaccatcgaccggaagaggtacaccagcaccaaagaggtgctggacgccaccctgatccaccagagcatcaccggcctgtacgagacacggatcgacctgtctcagctgggaggtgac

SEQ ID NO: 86 - DNA, 4101 bp, synthetic construct
  source 1..4101: mol_type = other DNA
gacaagaagtacagcatcggcctggccatcggcaccaactctgtgggctgggccgtgatcaccgacgagtacaaggtgcccagcaagaaattcaaggtgctgggcaacaccgaccggcacagcatcaagaagaacctgatcggagccctgctgttcgacagcggcgaaacagccgaggccacccggctgaagagaaccgccagaagaagatacaccagacggaagaaccggatctgctatctgcaagagatcttcagcaacgagatggccaaggtggacgacagcttcttccacagactggaagagtccttcctggtggaagaggataagaagcacgagcggcaccccatcttcggcaacatcgtggacgaggtggcctaccacgagaagtaccccaccatctaccacctgagaaagaaactggtggacagcaccgacaaggccgacctgcggctgatctatctggccctggcccacatgatcaagttccggggccacttcctgatcgagggcgacctgaaccccgacaacagcgacgtggacaagctgttcatccagctggtgcagacctacaaccagctgttcgaggaaaaccccatcaacgccagcggcgtggacgccaaggccatcctgtctgccagactgagcaagagcagacggctggaaaatctgatcgcccagctgcccggcgagaagaagaatggcctgttcggaaacctgattgccctgagcctgggcctgacccccaacttcaagagcaacttcgacctggccgaggatgccaaactgcagctgagcaaggacacctacgacgacgacctggacaacctgctggcccagatcggcgaccagtacgccgacctgtttctggccgccaagaacctgtccgacgccatcctgctgagcgacatcctgagagtgaacaccgagatcaccaaggcccccctgagcgcctctatgatcaagagatacgacgagcaccaccaggacctgaccctgctgaaagctctcgtgcggcagcagctgcctgagaagtacaaagagattttcttcgaccagagcaagaacggctacgccggctacattgacggcggagccagccaggaagagttctacaagttcatcaagcccatcctggaaaagatggacggcaccgaggaactgctcgtgaagctgaacagagaggacctgctgcggaagcagcggaccttcgacaacggcagcatcccccaccagatccacctgggagagctgcacgccattctgcggcggcaggaagatttttacccattcctgaaggacaaccgggaaaagatcgagaagatcctgaccttccgcatcccctactacgtgggccctctggccaggggaaacagcagattcgcctggatgaccagaaagagcgaggaaaccatcaccccctggaacttcgaggaagtggtggacaagggcgcttccgcccagagcttcatcgagcggatgaccaacttcgataagaacctgcccaacgagaaggtgctgcccaagcacagcctgctgtacgagtacttcaccgtgtataacgagctgaccaaagtgaaatacgtgaccgagggaatgagaaagcccgccttcctgagcggcgagcagaaaaaggccatcgtggacctgctgttcaagaccaaccggaaagtgaccgtgaagcagctgaaagaggactacttcaagaaaatcgagtgcttcgactccgtggaaatctccggcgtggaagatcggttcaacgcctccctgggcacataccacgatctgctgaaaattatcaaggacaaggacttcctggacaatgaggaaaacgaggacattctggaagatatcgtgctgaccctgacactgtttgaggacagagagatgatcgaggaacggctgaaaacctatgcccacctgttcgacgacaaagtgatgaagcagctgaagcggcggagatacaccggctggggcaggctgagccggaagctgatcaacggcatccgggacaagcagtccggcaagacaatcctggatttcctgaagtccgacggcttcgccaacagaaacttcatgcagctgatccacgacgacagcctgacctttaaagaggacatccagaaagcccaggtgtccggccagggcgatagcctgcacgagcacattgccaatctggccggcagccccgccattaagaagggcatcctgcagacagtgaaggtggtggacgagctcgtgaaagtgatgggccggcacaagcccgagaacatcgtgatcgaaatggccagagagaaccagaccacccagaagggacagaagaacagccgcgagagaatgaagcggatcgaagagggcatcaaagagctgggcagccagatcctgaaagaacaccccgtggaaaacacccagctgcagaacgagaagctgtacctgtactacctgcagaatgggcgggatatgtacgtggaccaggaactggacatcaaccggctgtccgactacgatgtggaccatatcgtgcctcagagctttctgaaggacgactccatcgacaacaaggtgctgaccagaagcgacaagaaccggggcaagagcgacaacgtgccctccgaagaggtcgtgaagaagatgaagaactactggcggcagctgctgaacgccaagctgattacccagagaaagttcgacaatctgaccaaggccgagagaggcggcctgagcgaactggataaggccggcttcatcaagagacagctggtggaaacccggcagatcacaaagcacgtggcacagatcctggactcccggatgaacactaagtacgacgagaatgacaagctgatccgggaagtgaaagtgatcaccctgaagtccaagctggtgtccgatttccggaaggatttccagttttacaaagtgcgcgagatcaacaactaccaccacgcccacgacgcctacctgaacgccgtcgtgggaaccgccctgatcaaaaagtaccctaagctggaaagcgagttcgtgtacggcgactacaaggtgtacgacgtgcggaagatgatcgccaagagcgagcaggaaatcggcaaggctaccgccaagtacttcttctacagcaacatcatgaactttttcaagaccgagattaccctggccaacggcgagatccggaagcggcctctgatcgagacaaacggcgaaaccggggagatcgtgtgggataagggccgggattttgccaccgtgcggaaagtgctgagcatgccccaagtgaatatcgtgaaaaagaccgaggtgcagacaggcggcttcagcaaagagtctatcctgcccaagaggaacagcgataagctgatcgccagaaagaaggactgggaccctaagaagtacggcggcttcgacagccccaccgtggcctattctgtgctggtggtggccaaagtggaaaagggcaagtccaagaaactgaagagtgtgaaagagctgctggggatcaccatcatggaaagaagcagcttcgagaagaatcccatcgactttctggaagccaagggctacaaagaagtgaaaaaggacctgatcatcaagctgcctaagtactccctgttcgagctggaaaacggccggaagagaatgctggcctctgccggcgaactgcagaagggaaacgaactggccctgccctccaaatatgtgaacttcctgtacctggccagccactatgagaagctgaagggctcccccgaggataatgagcagaaacagctgtttgtggaacagcacaagcactacctggacgagatcatcgagcagatcagcgagttctccaagagagtgatcctggccgacgctaatctggacaaagtgctgtccgcctacaacaagcaccgggataagcccatcagagagcaggccgagaatatcatccacctgtttaccctgaccaatctgggagcccctgccgccttcaagtactttgacaccaccatcgaccggaagaggtacaccagcaccaaagaggtgctggacgccaccctgatccaccagagcatcaccggcctgtacgagacacggatcgacctgtctcagctgggaggtgac

SEQ ID NO: 87 - DNA, 4101 bp, synthetic construct
  source 1..4101: mol_type = other DNA
gacaagaagtacagcatcggcctggacatcggcaccaactctgtgggctgggccgtgatcaccgacgagtacaaggtgcccagcaagaaattcaaggtgctgggcaacaccgaccggcacagcatcaagaagaacctgatcggagccctgctgttcgacagcggcgaaacagccgaggccacccggctgaagagaaccgccagaagaagatacaccagacggaagaaccggatctgctatctgcaagagatcttcagcaacgagatggccaaggtggacgacagcttcttccacagactggaagagtccttcctggtggaagaggataagaagcacgagcggcaccccatcttcggcaacatcgtggacgaggtggcctaccacgagaagtaccccaccatctaccacctgagaaagaaactggtggacagcaccgacaaggccgacctgcggctgatctatctggccctggcccacatgatcaagttccggggccacttcctgatcgagggcgacctgaaccccgacaacagcgacgtggacaagctgttcatccagctggtgcagacctacaaccagctgttcgaggaaaaccccatcaacgccagcggcgtggacgccaaggccatcctgtctgccagactgagcaagagcagacggctggaaaatctgatcgcccagctgcccggcgagaagaagaatggcctgttcggaaacctgattgccctgagcctgggcctgacccccaacttcaagagcaacttcgacctggccgaggatgccaaactgcagctgagcaaggacacctacgacgacgacctggacaacctgctggcccagatcggcgaccagtacgccgacctgtttctggccgccaagaacctgtccgacgccatcctgctgagcgacatcctgagagtgaacaccgagatcaccaaggcccccctgagcgcctctatgatcaagagatacgacgagcaccaccaggacctgaccctgctgaaagctctcgtgcggcagcagctgcctgagaagtacaaagagattttcttcgaccagagcaagaacggctacgccggctacattgacggcggagccagccaggaagagttctacaagttcatcaagcccatcctggaaaagatggacggcaccgaggaactgctcgtgaagctgaacagagaggacctgctgcggaagcagcggaccttcgacaacggcagcatcccccaccagatccacctgggagagctgcacgccattctgcggcggcaggaagatttttacccattcctgaaggacaaccgggaaaagatcgagaagatcctgaccttccgcatcccctactacgtgggccctctggccaggggaaacagcagattcgcctggatgaccagaaagagcgaggaaaccatcaccccctggaacttcgaggaagtggtggacaagggcgcttccgcccagagcttcatcgagcggatgaccaacttcgataagaacctgcccaacgagaaggtgctgcccaagcacagcctgctgtacgagtacttcaccgtgtataacgagctgaccaaagtgaaatacgtgaccgagggaatgagaaagcccgccttcctgagcggcgagcagaaaaaggccatcgtggacctgctgttcaagaccaaccggaaagtgaccgtgaagcagctgaaagaggactacttcaagaaaatcgagtgcttcgactccgtggaaatctccggcgtggaagatcggttcaacgcctccctgggcacataccacgatctgctgaaaattatcaaggacaaggacttcctggacaatgaggaaaacgaggacattctggaagatatcgtgctgaccctgacactgtttgaggacagagagatgatcgaggaacggctgaaaacctatgcccacctgttcgacgacaaagtgatgaagcagctgaagcggcggagatacaccggctggggcaggctgagccggaagctgatcaacggcatccgggacaagcagtccggcaagacaatcctggatttcctgaagtccgacggcttcgccaacagaaacttcatgcagctgatccacgacgacagcctgacctttaaagaggacatccagaaagcccaggtgtccggccagggcgatagcctgcacgagcacattgccaatctggccggcagccccgccattaagaagggcatcctgcagacagtgaaggtggtggacgagctcgtgaaagtgatgggccggcacaagcccgagaacatcgtgatcgaaatggccagagagaaccagaccacccagaagggacagaagaacagccgcgagagaatgaagcggatcgaagagggcatcaaagagctgggcagccagatcctgaaagaacaccccgtggaaaacacccagctgcagaacgagaagctgtacctgtactacctgcagaatgggcgggatatgtacgtggaccaggaactggacatcaaccggctgtccgactacgatgtggacgccatcgtgcctcagagctttctgaaggacgactccatcgacaacaaggtgctgaccagaagcgacaagaaccggggcaagagcgacaacgtgccctccgaagaggtcgtgaagaagatgaagaactactggcggcagctgctgaacgccaagctgattacccagagaaagttcgacaatctgaccaaggccgagagaggcggcctgagcgaactggataaggccggcttcatcaagagacagctggtggaaacccggcagatcacaaagcacgtggcacagatcctggactcccggatgaacactaagtacgacgagaatgacaagctgatccgggaagtgaaagtgatcaccctgaagtccaagctggtgtccgatttccggaaggatttccagttttacaaagtgcgcgagatcaacaactaccaccacgcccacgacgcctacctgaacgccgtcgtgggaaccgccctgatcaaaaagtaccctaagctggaaagcgagttcgtgtacggcgactacaaggtgtacgacgtgcggaagatgatcgccaagagcgagcaggaaatcggcaaggctaccgccaagtacttcttctacagcaacatcatgaactttttcaagaccgagattaccctggccaacggcgagatccggaagcggcctctgatcgagacaaacggcgaaaccggggagatcgtgtgggataagggccgggattttgccaccgtgcggaaagtgctgagcatgccccaagtgaatatcgtgaaaaagaccgaggtgcagacaggcggcttcagcaaagagtctatcctgcccaagaggaacagcgataagctgatcgccagaaagaaggactgggaccctaagaagtacggcggcttcgacagccccaccgtggcctattctgtgctggtggtggccaaagtggaaaagggcaagtccaagaaactgaagagtgtgaaagagctgctggggatcaccatcatggaaagaagcagcttcgagaagaatcccatcgactttctggaagccaagggctacaaagaagtgaaaaaggacctgatcatcaagctgcctaagtactccctgttcgagctggaaaacggccggaagagaatgctggcctctgccggcgaactgcagaagggaaacgaactggccctgccctccaaatatgtgaacttcctgtacctggccagccactatgagaagctgaagggctcccccgaggataatgagcagaaacagctgtttgtggaacagcacaagcactacctggacgagatcatcgagcagatcagcgagttctccaagagagtgatcctggccgacgctaatctggacaaagtgctgtccgcctacaacaagcaccgggataagcccatcagagagcaggccgagaatatcatccacctgtttaccctgaccaatctgggagcccctgccgccttcaagtactttgacaccaccatcgaccggaagaggtacaccagcaccaaagaggtgctggacgccaccctgatccaccagagcatcaccggcctgtacgagacacggatcgacctgtctcagctgggaggtgac

SEQ ID NO: 88 - protein, 1409 aa, Streptococcus thermophilus
MLFNKCIIISINLDFSNKEKCMTKPYSIGLDIGTNSVGWAVITDNYKVPSKKMKVLGNTSKKYIKKNLLGVLLFDSGITAEGRRLKRTARRRYTRRRNRILYLQEIFSTEMATLDDAFFQRLDDSFLVPDDKRDSKYPIFGNLVEEKVYHDEFPTIYHLRKYLADSTKKADLRLVYLALAHMIKYRGHFLIEGEFNSKNNDIQKNFQDFLDTYNAIFESDLSLENSKQLEEIVKDKISKLEKKDRILKLFPGEKNSGIFSEFLKLIVGNQADFRKCFNLDEKASLHFSKESYDEDLETLLGYIGDDYSDVFLKAKKLYDAILLSGFLTVTDNETEAPLSSAMIKRYNEHKEDLALLKEYIRNISLKTYNEVFKDDTKNGYAGYIDGKTNQEDFYVYLKNLLAEFEGADYFLEKIDREDFLRKQRTFDNGSIPYQIHLQEMRAILDKQAKFYPFLAKNKERIEKILTFRIPYYVGPLARGNSDFAWSIRKRNEKITPWNFEDVIDKESSAEAFINRMTSFDLYLPEEKVLPKHSLLYETFNVYNELTKVRFIAESMRDYQFLDSKQKKDIVRLYFKDKRKVTDKDIIEYLHAIYGYDGIELKGIEKQFNSSLSTYHDLLNIINDKEFLDDSSNEAIIEEIIHTLTIFEDREMIKQRLSKFENIFDKSVLKKLSRRHYTGWGKLSAKLINGIRDEKSGNTILDYLIDDGISNRNFMQLIHDDALSFKKKIQKAQIIGDEDKGNIKEVVKSLPGSPAIKKGILQSIKIVDELVKVMGGRKPESIVVEMARENQYTNQGKSNSQQRLKRLEKSLKELGSKILKENIPAKLSKIDNNALQNDRLYLYYLQNGKDMYTGDDLDIDRLSNYDIDHIIPQAFLKDNSIDNKVLVSSASNRGKSDDFPSLEVVKKRKTFWYQLLKSKLISQRKFDNLTKAERGGLLPEDKAGFIQRQLVETRQITKHVARLLDEKFNNKKDENNRAVRTVKIITLKSTLVSQFRKDFELYKVREINDFHHAHDAYLNAVIASALLKKYPKLEPEFVYGDYPKYNSFRERKSATEKVYFYSNIMNIFKKSISLADGRVIERPLIEVNEETGESVWNKESDLATVRRVLSYPQVNVVKKVEEQNHGLDRGKPKGLFNANLSSKPKPNSNENLVGAKEYLDPKKYGGYAGISNSFAVLVKGTIEKGAKKKITNVLEFQGISILDRINYRKDKLNFLLEKGYKDIELIIELPKYSLFELSDGSRRMLASILSTNNKRGEIHKGNQIFLSQKFVKLLYHAKRISNTINENHRKYVENHKKEFEELFYYILEFNENYVGAKKNGKLLNSAFQSWQNHSIDELCSSFIGPTGSERKGLFELTSRGSAADFEFLGVKIPRYRDYTPSSLLKDATLIHQSVTGLYETRIDLAKLGEG

SEQ ID NO: 89 - protein, 1053 aa, Staphylococcus aureus
MKRNYILGLDIGITSVGYGIIDYETRDVIDAGVRLFKEANVENNEGRRSKRGARRLKRRRRHRIQRVKKLLFDYNLLTDHSELSGINPYEARVKGLSQKLSEEEFSAALLHLAKRRGVHNVNEVEEDTGNELSTKEQISRNSKALEEKYVAELQLERLKKDGEVRGSINRFKTSDYVKEAKQLLKVQKAYHQLDQSFIDTYIDLLETRRTYYEGPGEGSPFGWKDIKEWYEMLMGHCTYFPEELRSVKYAYNADLYNALNDLNNLVITRDENEKLEYYEKFQIIENVFKQKKKPTLKQIAKEILVNEEDIKGYRVTSTGKPEFTNLKVYHDIKDITARKEIIENAELLDQIAKILTIYQSSEDIQEELTNLNSELTQEEIEQISNLKGYTGTHNLSLKAINLILDELWHTNDNQIAIFNRLKLVPKKVDLSQQKEIPTTLVDDFILSPVVKRSFIQSIKVINAIIKKYGLPNDIIIELAREKNSKDAQKMINEMQKRNRQTNERIEEIIRTTGKENAKYLIEKIKLHDMQEGKCLYSLEAIPLEDLLNNPFNYEVDHIIPRSVSFDNSFNNKVLVKQEENSKKGNRTPFQYLSSSDSKISYETFKKHILNLAKGKGRISKTKKEYLLEERDINRFSVQKDFINRNLVDTRYATRGLMNLLRSYFRVNNLDVKVKSINGGFTSFLRRKWKFKKERNKGYKHHAEDALIIANADFIFKEWKKLDKAKKVMENQMFEEKQAESMPEIETEQEYKEIFITPHQIKHIKDFKDYKYSHRVDKKPNRELINDTLYSTRKDDKGNTLIVNNLNGLYDKDNDKLKKLINKSPEKLLMYHHDPQTYQKLKLIMEQYGDEKNPLYKYYEETGNYLTKYSKKDNGPVIKKIKYYGNKLNAHLDITDDYPNSRNKVVKLSLKPYRFDVYLDNGVYKFVTVKNLDVIKKENYYEVNSKCYEEAKKLKKISNQAEFIASFYNNDLIKINGELYRVIGVNNDLLNRIEVNMIDITYREYLENMNDKRPPRIIKTIASKTQSIKKYSTDILGNLYEVKSKKHPQIIKKG

SEQ ID NO: 90 - protein, 1629 aa, Francisella tularensis
MNFKILPIAIDLGVKNTGVFSAFYQKGTSLERLDNKNGKVYELSKDSYTLLMNNRTARRHQRRGIDRKQLVKRLFKLIWTEQLNLEWDKDTQQAISFLFNRRGFSFITDGYSPEYLNIVPEQVKAILMDIFDDYNGEDDLDSYLKLATEQESKISEIYNKLMQKILEFKLMKLCTDIKDDKVSTKTLKEITSYEFELLADYLANYSESLKTQKFSYTDKQGNLKELSYYHHDKYNIQEFLKRHATINDRILDTLLTDDLDIWNFNFEKFDFDKNEEKLQNQEDKDHIQAHLHHFVFAVNKIKSEMASGGRHRSQYFQEITNVLDENNHQEGYLKNFCENLHNKKYSNLSVKNLVNLIGNLSNLELKPLRKYFNDKIHAKADHWDEQKFTETYCHWILGEWRVGVKDQDKKDGAKYSYKDLCNELKQKVTKAGLVDFLLELDPCRTIPPYLDNNNRKPPKCQSLILNPKFLDNQYPNWQQYLQELKKLQSIQNYLDSFETDLKVLKSSKDQPYFVEYKSSNQQIASGQRDYKDLDARILQFIFDRVKASDELLLNEIYFQAKKLKQKASSELEKLESSKKLDEVIANSQLSQILKSQHTNGIFEQGTFLHLVCKYYKQRQRARDSRLYIMPEYRYDKKLHKYNNTGRFDDDNQLLTYCNHKPRQKRYQLLNDLAGVLQVSPNFLKDKIGSDDDLFISKWLVEHIRGFKKACEDSLKIQKDNRGLLNHKINIARNTKGKCEKEIFNLICKIEGSEDKKGNYKHGLAYELGVLLFGEPNEASKPEFDRKIKKFNSIYSFAQIQQIAFAERKGNANTCAVCSADNAHRMQQIKITEPVEDNKDKIILSAKAQRLPAIPTRIVDGAVKKMATILAKNIVDDNWQNIKQVLSAKHQLHIPIITESNAFEFEPALADVKGKSLKDRRKKALERISPENIFKDKNNRIKEFAKGISAYSGANLTDGDFDGAKEELDHIIPRSHKKYGTLNDEANLICVTRGDNKNKGNRIFCLRDLADNYKLKQFETTDDLEIEKKIADTIWDANKKDFKFGNYRSFINLTPQEQKAFRHALFLADENPIKQAVIRAINNRNRTFVNGTQRYFAEVLANNIYLRAKKENLNTDKISFDYFGIPTIGNGRGIAEIRQLYEKVDSDIQAYAKGDKPQASYSHLIDAMLAFCIAADEHRNDGSIGLEIDKNYSLYPLDKNTGEVFTKDIFSQIKITDNEFSDKKLVRKKAIEGFNTHRQMTRDGIYAENYLPILIHKELNEVRKGYTWKNSEEIKIFKGKKYDIQQLNNLVYCLKFVDKPISIDIQISTLEELRNILTTNNIAATAEYYYINLKTQKLHEYYIENYNTALGYKKYSKEMEFLRSLAYRSERVKIKSIDDVKQVLDKDSNFIIGKITLPFKKEWQRLYREWQNTTIKDDYEFLKSFFNVKSITKLHKKVRKDFSLPISTNEGKFLVKRKTWDNNFIYQILNDSDSRADGTKPFIPAFDISKNEIVEAIIDSFTSKNIFWLPKNIELQKVDNKNIFAIDTSKWFEVETPSDLRDIGIATIQYKIDNNSRPKVRVKLDYVIDDDSKINYFMNHSLLKSRYPDKVLEILKQSTIIEFESSGFNKTIKEMLGMKLAGIYNETSNN

SEQ ID NO: 91 - protein, 1101 aa, Actinomyces naeslundii
MWYASLMSAHHLRVGIDVGTHSVGLATLRVDDHGTPIELLSALSHIHDSGVGKEGKKDHDTRKKLSGIARRARRLLHHRRTQLQQLDEVLRDLGFPIPTPGEFLDLNEQTDPYRVWRVRARLVEEKLPEELRGPAISMAVRHIARHRGWRNPYSKVESLLSPAEESPFMKALRERILATTGEVLDDGITPGQAMAQVALTHNISMRGPEGILGKLHQSDNANEIRKICARQGVSPDVCKQLLRAVFKADSPRGSAVSRVAPDPLPGQGSFRRAPKCDPEFQRFRIISIVANLRISETKGENRPLTADERRHVVTFLTEDSQADLTWVDVAEKLGVHRRDLRGTAVHTDDGERSAARPPIDATDRIMRQTKISSLKTWWEEADSEQRGAMIRYLYEDPTDSECAEIIAELPEEDQAKLDSLHLPAGRAAYSRESLTALSDHMLATTDDLHEARKRLFGVDDSWAPPAEAINAPVGNPSVDRTLKIVGRYLSAVESMWGTPEVIHVEHVRDGFTSERMADERDKANRRRYNDNQEAMKKIQRDYGKEGYISRGDIVRLDALELQGCACLYCGTTIGYHTCQLDHIVPQAGPGSNNRRGNLVAVCERCNRSKSNTPFAVWAQKCGIPHVGVKEAIGRVRGWRKQTPNTSSEDLTRLKKEVIARLRRTQEDPEIDERSMESVAWMANELHHRIAAAYPETTVMVYRGSITAAARKAAGIDSRINLIGEKGRKDRIDRRHHAVDASVVALMEASVAKTLAERSSLRGEQRLTGKEQTWKQYTGSTVGAREHFEMWRGHMLHLTELFNERLAEDKVYVTQNIRLRLSDGNAHTVNPSKLVSHRLGDGLTVQQIDRACTPALWCALTREKDFDEKNGLPAREDRAIRVHGHEIKSSDYIQVFSKRKKTDSDRDETPFGAIAVRGGFVEIGPSIHHARIYRVEGKKPVYAMLRVFTHDLLSQRHGDLFSAVIPPQSISMRCAEPKLRKAITTGNATYLGWVVVGDELEINVDSFTKYAIGRFLEDFPNTTRWRICGYDTNSKLTLKPIVLAAEGLENPSSAVNEIVELKGWRVAINVLTKVHPTVVRRDALGRPRYSSRSNLPTSWTIE

SEQ ID NO: 92 - protein, 1082 aa, Neisseria meningitidis
MAAFKPNSINYILGLDIGIASVGWAMVEIDEEENPIRLIDLGVRVFERAEVPKTGDSLAMARRLARSVRRLTRRRAHRLLRTRRLLKREGVLQAANFDENGLIKSLPNTPWQLRAAALDRKLTPLEWSAVLLHLIKHRGYLSQRKNEGETADKELGALLKGVAGNAHALQTGDFRTPAELALNKFEKESGHIRNQRSDYSHTFSRKDLQAELILLFEKQKEFGNPHVSGGLKEGIETLLMTQRPALSGDAVQKMLGHCTFEPAEPKAAKNTYTAERFIWLTKLNNLRILEQGSERPLTDTERATLMDEPYRKSKLTYAQARKLLGLEDTAFFKGLRYGKDNAEASTLMEMKAYHAISRALEKEGLKDKKSPLNLSPELQDEIGTAFSLFKTDEDITGRLKDRIQPEILEALLKHISFDKFVQISLKALRRIVPLMEQGKRYDEACAEIYGDHYGKKNTEEKIYLPPIPADEIRNPVVLRALSQARKVINGVVRRYGSPARIHIETAREVGKSFKDRKEIEKRQEENRKDREKAAAKFREYFPNFVGEPKSKDILKLRLYEQQHGKCLYSGKEINLGRLNEKGYVEIDHALPFSRTWDDSFNNKVLVLGSENQNKGNQTPYEYFNGKDNSREWQEFKARVETSRFPRSKKQRILLQKFDEDGFKERNLNDTRYVNRFLCQFVADRMRLTGKGKKRVFASNGQITNLLRGFWGLRKVRAENDRHHALDAVVVACSTVAMQQKITRFVRYKEMNAFDGKTIDKETGEVLHQKTHFPQPWEFFAQEVMIRVFGKPDGKPEFEEADTLEKLRTLLAEKLSSRPEAVHEYVTPLFVSRAPNRKMSGQGHMETVKSAKRLDEGVSVLRVPLTQLKLKDLEKMVNREREPKLYEALKARLEAHKDDPAKAFAEPFYKYDKAGNRTQQVKAVRVEQVQKTGVWVRNHNGIADNATMVRVDVFEKGDKYYLVPIYSWQVAKGILPDRAVVQGKDEEDWQLIDDSFNFKFSLHPNDLVEVITKKARMFGYFASCHRGTGNINIRIHDLDHKIGKNGILEGIGVKTALSFQKYQIDELGKEIRPCRLKKRPPVR

SEQ ID NO: 93 - protein, 1334 aa, Listeria innocua
MKKPYTIGLDIGTNSVGWAVLTDQYDLVKRKMKIAGDSEKKQIKKNFWGVRLFDEGQTAADRRMARTARRRIERRRNRISYLQGIFAEEMSKTDANFFCRLSDSFYVDNEKRNSRHPFFATIEEEVEYHKNYPTIYHLREELVNSSEKADLRLVYLALAHIIKYRGNFLIEGALDTQNTSVDGIYKQFIQTYNQVFASGIEDGSLKKLEDNKDVAKILVEKVTRKEKLERILKLYPGEKSAGMFAQFISLIVGSKGNFQKPFDLIEKSDIECAKDSYEEDLESLLALIGDEYAELFVAAKNAYSAVVLSSIITVAETETNAKLSASMIERFDTHEEDLGELKAFIKLHLPKHYEEIFSNTEKHGYAGYIDGKTKQADFYKYMKMTLENIEGADYFIAKIEKENFLRKQRTFDNGAIPHQLHLEELEAILHQQAKYYPFLKENYDKIKSLVTFRIPYFVGPLANGQSEFAWLTRKADGEIRPWNIEEKVDFGKSAVDFIEKMTNKDTYLPKENVLPKHSLCYQKYLVYNELTKVRYINDQGKTSYFSGQEKEQIFNDLFKQKRKVKKKDLELFLRNMSHVESPTIEGLEDSFNSSYSTYHDLLKVGIKQEILDNPVNTEMLENIVKILTVFEDKRMIKEQLQQFSDVLDGVVLKKLERRHYTGWGRLSAKLLMGIRDKQSHLTILDYLMNDDGLNRNLMQLINDSNLSFKSIIEKEQVTTADKDIQSIVADLAGSPAIKKGILQSLKIVDELVSVMGYPPQTIVVEMARENQTTGKGKNNSRPRYKSLEKAIKEFGSQILKEHPTDNQELRNNRLYLYYLQNGKDMYTGQDLDIHNLSNYDIDHIVPQSFITDNSIDNLVLTSSAGNREKGDDVPPLEIVRKRKVFWEKLYQGNLMSKRKFDYLTKAERGGLTEADKARFIHRQLVETRQITKNVANILHQRFNYEKDDHGNTMKQVRIVTLKSALVSQFRKQFQLYKVRDVNDYHHAHDAYLNGVVANTLLKVYPQLEPEFVYGDYHQFDWFKANKATAKKQFYTNIMLFFAQKDRIIDENGEILWDKKYLDTVKKVMSYRQMNIVKKTEIQKGEFSKATIKPKGNSSKLIPRKTNWDPMKYGGLDSPNMAYAVVIEYAKGKNKLVFEKKIIRVTIMERKAFEKDEKAFLEEQGYRQPKVLAKLPKYTLYECEEGRRRMLASANEAQKGNQQVLPNHLVTLLHHAANCEVSDGKSLDYIESNREMFAELLAHVSEFAKRYTLAEANLNKINQLFEQNKEGDIKAIAQSFVDLMAFNAMGAPASFKFFETTIERKRYNNLKELLNSTIIYQSITGLYESRKRLDD

SEQ ID NO: 94 - protein, 1345 aa, Streptococcus mutans
MKKPYSIGLDIGTNSVGWAVVTDDYKVPAKKMKVLGNTDKSHIEKNLLGALLFDSGNTAEDRRLKRTARRRYTRRRNRILYLQEIFSEEMGKVDDSFFHRLEDSFLVTEDKRGERHPIFGNLEEEVKYHENFPTIYHLRQYLADNPEKVDLRLVYLALAHIIKFRGHFLIEGKFDTRNNDVQRLFQEFLAVYDNTFENSSLQEQNVQVEEILTDKISKSAKKDRVLKLFPNEKSNGRFAEFLKLIVGNQADFKKHFELEEKAPLQFSKDTYEEELEVLLAQIGDNYAELFLSAKKLYDSILLSGILTVTDVGTKAPLSASMIQRYNEHQMDLAQLKQFIRQKLSDKYNEVFSDVSKDGYAGYIDGKTNQEAFYKYLKGLLNKIEGSGYFLDKIEREDFLRKQRTFDNGSIPHQIHLQEMRAIIRRQAEFYPFLADNQDRIEKLLTFRIPYYVGPLARGKSDFAWLSRKSADKITPWNFDEIVDKESSAEAFINRMTNYDLYLPNQKVLPKHSLLYEKFTVYNELTKVKYKTEQGKTAFFDANMKQEIFDGVFKVYRKVTKDKLMDFLEKEFDEFRIVDLTGLDKENKVFNASYGTYHDLCKILDKDFLDNSKNEKILEDIVLTLTLFEDREMIRKRLENYSDLLTKEQVKKLERRHYTGWGRLSAELIHGIRNKESRKTILDYLIDDGNSNRNFMQLINDDALSFKEEIAKAQVIGETDNLNQVVSDIAGSPAIKKGILQSLKIVDELVKIMGHQPENIVVEMARENQFTNQGRRNSQQRLKGLTDSIKEFGSQILKEHPVENSQLQNDRLFLYYLQNGRDMYTGEELDIDYLSQYDIDHIIPQAFIKDNSIDNRVLTSSKENRGKSDDVPSKDVVRKMKSYWSKLLSAKLITQRKFDNLTKAERGGLTDDDKAGFIKRQLVETRQITKHVARILDERFNTETDENNKKIRQVKIVTLKSNLVSNFRKEFELYKVREINDYHHAHDAYLNAVIGKALLGVYPQLEPEFVYGDYPHFHGHKENKATAKKFFYSNIMNFFKKDDVRTDKNGEIIWKKDEHISNIKKVLSYPQVNIVKKVEEQTGGFSKESILPKGNSDKLIPRKTKKFYWDTKKYGGFDSPIVAYSILVIADIEKGKSKKLKTVKALVGVTIMEKMTFERDPVAFLERKGYRNVQEENIIKLPKYSLFKLENGRKRLLASARELQKGNEIVLPNHLGTLLYHAKNIHKVDEPKHLDYVDKHKDEFKELLDVVSNFSKKYTLAEGNLEKIKELYAQNNGEDLKELASSFINLLTFTAIGAPATFKFFDKNIDRKRYTSTTEILNATLIHQSITGLYETRIDLNKLGGD

SEQ ID NO: 95 - protein, 1084 aa, Corynebacterium diphtheriae
MKYHVGIDVGTFSVGLAAIEVDDAGMPIKTLSLVSHIHDSGLDPDEIKSAVTRLASSGIARRTRRLYRRKRRRLQQLDKFIQRQGWPVIELEDYSDPLYPWKVRAELAASYIADEKERGEKLSVALRHIARHRGWRNPYAKVSSLYLPDGPSDAFKAIREEIKRASGQPVPETATVGQMVTLCELGTLKLRGEGGVLSARLQQSDYAREIQEICRMQEIGQELYRKIIDVVFAAESPKGSASSRVGKDPLQPGKNRALKASDAFQRYRIAALIGNLRVRVDGEKRILSVEEKNLVFDHLVNLTPKKEPEWVTIAEILGIDRGQLIGTATMTDDGERAGARPPTHDTNRSIVNSRIAPLVDWWKTASALEQHAMVKALSNAEVDDFDSPEGAKVQAFFADLDDDVHAKLDSLHLPVGRAAYSEDTLVRLTRRMLSDGVDLYTARLQEFGIEPSWTPPTPRIGEPVGNPAVDRVLKTVSRWLESATKTWGAPERVIIEHVREGFVTEKRAREMDGDMRRRAARNAKLFQEMQEKLNVQGKPSRADLWRYQSVQRQNCQCAYCGSPITFSNSEMDHIVPRAGQGSTNTRENLVAVCHRCNQSKGNTPFAIWAKNTSIEGVSVKEAVERTRHWVTDTGMRSTDFKKFTKAVVERFQRATMDEEIDARSMESVAWMANELRSRVAQHFASHGTTVRVYRGSLTAEARRASGISGKLKFFDGVGKSRLDRRHHAIDAAVIAFTSDYVAETLAVRSNLKQSQAHRQEAPQWREFTGKDAEHRAAWRVWCQKMEKLSALLTEDLRDDRVVVMSNVRLRLGNGSAHKETIGKLSKVKLSSQLSVSDIDKASSEALWCALTREPGFDPKEGLPANPERHIRVNGTHVYAGDNIGLFPVSAGSIALRGGYAELGSSFHHARVYKITSGKKPAFAMLRVYTIDLLPYRNQDLFSVELKPQTMSMRQAEKKLRDALATGNAEYLGWLVVDDELVVDTSKIATDQVKAVEAELGTIRRWRVDGFFSPSKLRLRPLQMSKEGIKKESAPELSKIIDRPGWLPAVNKLFSDGNVTVVRRDSLGRVRLESTAHLPVTWKVQ

SEQ ID NO: 96 - protein, 1367 aa, synthetic construct
DKKYSIGLAIGTNSVGWAVITDEYKVPSKKFKVLGNTDRHSIKKNLIGALLFDSGETAEATRLKRTARRRYTRRKNRICYLQEIFSNEMAKVDDSFFHRLEESFLVEEDKKHERHPIFGNIVDEVAYHEKYPTIYHLRKKLVDSTDKADLRLIYLALAHMIKFRGHFLIEGDLNPDNSDVDKLFIQLVQTYNQLFEENPINASGVDAKAILSARLSKSRRLENLIAQLPGEKKNGLFGNLIALSLGLTPNFKSNFDLAEDAKLQLSKDTYDDDLDNLLAQIGDQYADLFLAAKNLSDAILLSDILRVNTEITKAPLSASMIKRYDEHHQDLTLLKALVRQQLPEKYKEIFFDQSKNGYAGYIDGGASQEEFYKFIKPILEKMDGTEELLVKLNREDLLRKQRTFDNGSIPHQIHLGELHAILRRQEDFYPFLKDNREKIEKILTFRIPYYVGPLARGNSRFAWMTRKSEETITPWNFEEVVDKGASAQSFIERMTNFDKNLPNEKVLPKHSLLYEYFTVYNELTKVKYVTEGMRKPAFLSGEQKKAIVDLLFKTNRKVTVKQLKEDYFKKIECFDSVEISGVEDRFNASLGTYHDLLKIIKDKDFLDNEENEDILEDIVLTLTLFEDREMIEERLKTYAHLFDDKVMKQLKRRRYTGWGRLSRKLINGIRDKQSGKTILDFLKSDGFANRNFMQLIHDDSLTFKEDIQKAQVSGQGDSLHEHIANLAGSPAIKKGILQTVKVVDELVKVMGRHKPENIVIEMARENQTTQKGQKNSRERMKRIEEGIKELGSQILKEHPVENTQLQNEKLYLYYLQNGRDMYVDQELDINRLSDYDVDHIVPQSFLKDDSIDNKVLTRSDKNRGKSDNVPSEEVVKKMKNYWRQLLNAKLITQRKFDNLTKAERGGLSELDKAGFIKRQLVETRQITKHVAQILDSRMNTKYDENDKLIREVKVITLKSKLVSDFRKDFQFYKVREINNYHHAHDAYLNAVVGTALIKKYPKLESEFVYGDYKVYDVRKMIAKSEQEIGKATAKYFFYSNIMNFFKTEITLANGEIRKRPLIETNGETGEIVWDKGRDFATVRKVLSMPQVNIVKKTEVQTGGFSKESILPKRNSDKLIARKKDWDPKKYGGFDSPTVAYSVLVVAKVEKGKSKKLKSVKELLGITIMERSSFEKNPIDFLEAKGYKEVKKDLIIKLPKYSLFELENGRKRMLASAGELQKGNELALPSKYVNFLYLASHYEKLKGSPEDNEQKQLFVEQHKHYLDEIIEQISEFSKRVILADANLDKVLSAYNKHRDKPIREQAENIIHLFTLTNLGAPAAFKYFDTTIDRKRYTSTKEVLDATLIHQSITGLYETRIDLSQLGGD

SEQ ID NO: 97 - protein, 1367 aa, synthetic construct
DKKYSIGLAIGTNSVGWAVITDEYKVPSKKFKVLGNTDRHSIKKNLIGALLFDSGETAEATRLKRTARRRYTRRKNRICYLQEIFSNEMAKVDDSFFHRLEESFLVEEDKKHERHPIFGNIVDEVAYHEKYPTIYHLRKKLVDSTDKADLRLIYLALAHMIKFRGHFLIEGDLNPDNSDVDKLFIQLVQTYNQLFEENPINASGVDAKAILSARLSKSRRLENLIAQLPGEKKNGLFGNLIALSLGLTPNFKSNFDLAEDAKLQLSKDTYDDDLDNLLAQIGDQYADLFLAAKNLSDAILLSDILRVNTEITKAPLSASMIKRYDEHHQDLTLLKALVRQQLPEKYKEIFFDQSKNGYAGYIDGGASQEEFYKFIKPILEKMDGTEELLVKLNREDLLRKQRTFDNGSIPHQIHLGELHAILRRQEDFYPFLKDNREKIEKILTFRIPYYVGPLARGNSRFAWMTRKSEETITPWNFEEVVDKGASAQSFIERMTNFDKNLPNEKVLPKHSLLYEYFTVYNELTKVKYVTEGMRKPAFLSGEQKKAIVDLLFKTNRKVTVKQLKEDYFKKIECFDSVEISGVEDRFNASLGTYHDLLKIIKDKDFLDNEENEDILEDIVLTLTLFEDREMIEERLKTYAHLFDDKVMKQLKRRRYTGWGRLSRKLINGIRDKQSGKTILDFLKSDGFANRNFMQLIHDDSLTFKEDIQKAQVSGQGDSLHEHIANLAGSPAIKKGILQTVKVVDELVKVMGRHKPENIVIEMARENQTTQKGQKNSRERMKRIEEGIKELGSQILKEHPVENTQLQNEKLYLYYLQNGRDMYVDQELDINRLSDYDVDHIVPQSFLADDSIDNKVLTRSDKNRGKSDNVPSEEVVKKMKNYWRQLLNAKLITQRKFDNLTKAERGGLSELDKAGFIKRQLVETRQITKHVAQILDSRMNTKYDENDKLIREVKVITLKSKLVSDFRKDFQFYKVREINNYHHAHDAYLNAVVGTALIKKYPALESEFVYGDYKVYDVRKMIAKSEQEIGKATAKYFFYSNIMNFFKTEITLANGEIRKAPLIETNGETGEIVWDKGRDFATVRKVLSMPQVNIVKKTEVQTGGFSKESILPKRNSDKLIARKKDWDPKKYGGFDSPTVAYSVLVVAKVEKGKSKKLKSVKELLGITIMERSSFEKNPIDFLEAKGYKEVKKDLIIKLPKYSLFELENGRKRMLASAGELQKGNELALPSKYVNFLYLASHYEKLKGSPEDNEQKQLFVEQHKHYLDEIIEQISEFSKRVILADANLDKVLSAYNKHRDKPIREQAENIIHLFTLTNLGAPAAFKYFDTTIDRKRYTSTKEVLDATLIHQSITGLYETRIDLSQLGGD

SEQ ID NO: 98 - protein, 1315 aa, synthetic construct
SKLEKFTNCYSLSKTLRFKAIPVGKTQENIDNKRLLVEDEKRAEDYKGVKKLLDRYYLSFINDVLHSIKLKNLNNYISLFRKKTRTEKENKELENLEINLRKEIAKAFKGNEGYKSLFKKDIIETILPEFLDDKDEIALVNSFNGFTTAFTGFFDNRENMFSEEAKSTSIAFRCINENLTRYISNMDIFEKVDAIFDKHEVQEIKEKILNSDYDVEDFFEGEFFNFVLTQEGIDVYNAIIGGFVTESGEKIKGLNEYINLYNQKTKQKLPKFKPLYKQVLSDRESLSFYGEGSSGIDGVKLSSTEKKKMDEIAPPKGSVFTCPICEKRSIVGVTANLVHDHNHDTGWGREWICDSCNTGLGRFKDNPKFLEKVIEYLKKGYTSDEEVLEVFRNTLNKNSEIFSSIKKLEKLFKNFDEYSSAGIFVKNGPAISTISKDIFGEWNVIRDKWNAEYDDIHLKKKAVVTEKYEDDRRKSFKKIGSFSLEQLQEYADADLSVVEKLKEIIIQKVDEIYKVYGSSEKLFDADFVLEKSLKKNDAVVAIMKDLLDSVKSFENYIKAFFGEGKETNRDESFYGDFVLAYDILLKVDHIYDAIRNYVTQKPYSKDKFKLYFQNPQFMGGWDKDKETDYRATILRYGSKYYLAIMDKKYAKCLQKIDKDDVNGNYEKINYKLLPGPNKMLPKVFFSKKWMAYYNPSEDIQKIYKNGTFKKGDMFNLNDCHKLIDFFKDSISRYPKWSNAYDFNFSETEKYKDIAGFYREVEEQGYKVSFESASKKEVDKLVEEGKLYMFQIYNKDFSDKSHGTPNLHTMYFKLLFDENNHGQIRLSGGAELFMRRASLKKEELVVHPANSPIANKNPDNPKKTTTLSYDVYKDKRFSEDQYELHIPIAINKCPKNIFKINTEVRVLLKHDDNPYVIGIARGERNLLYIVVVDGKGNIVEQYSLNEIINNFNGIRIKTDYHSLLDKKEKERFEARQNWTSIENIKELKAGYISQVVHKICELVEKYDAVIALEDLNSGFKNSRVKVEKQVYQKFEKMLIDKLNYMVDKKSNPCATGGALKGYQITNKFESFKSMSTQNGFIFYIPAWLTSKIDPSTGFVNLLKTKYTSIADSKKFISSFDRIMYVPEEDLFEFALDYKNFSRTDADYIKKWKLYSYGNRIRIFRNPKKNNVFDWEEVCLTSAYKELFNKYGINYQQGDIRALLCEQSDKAFYSSFMALMSLMLQMRNSITGRTDVDFLISPVKNSDGIFYDSRNYEAQENAILPKNADANGAYNIARKVLWAIGQFKKAEDEKLDKVKIAISNKEWLEYAQTSVKH

SEQ ID NO: 99 - protein, 1501 aa, synthetic construct
SKLEKFTNCYSLSKTLRFKAIPVGKTQENIDNKRLLVEDEKRAEDYKGVKKLLDRYYLSFINDVLHSIKLKNLNNYISLFRKKTRTEKENKELENLEINLRKEIAKAFKGNEGYKSLFKKDIIETILPEFLDDKDEIALVNSFNGFTTAFTGFFDNRENMFSEEAKSTSIAFRCINENLTRYISNMDIFEKVDAIFDKHEVQEIKEKILNSDYDVEDFFEGEFFNFVLTQEGIDVYNAIIGGFVTESGEKIKGLNEYINLYNQKTKQKLPKFKPLYKQVLSDRESLSFYGEGSSGAAPNIHGWGKEGHEIICKIAQTRLDETAAKAVKELLPESAEGDLSSLCLWADRVKFRYHWSSPLHYINTPDACSYQYNRDCKDESGEKGRCVAGAIYNYTTQLLSYKTAASSQSQYNLTEALLFVSHFMGDIHQPLHVSYASDKGGNTIEVHWYTRKANLHHIWDSNIIETAEADLYNSALEGMVDALKKNITTEWADQVKRWETCTKKTACPDIYASEGIQAACDWAYKGVTEGDTLEDEYFYSRLPIVYQRLAQGGVRLAATLNRIFGGYTSDEEVLEVFRNTLNKNSEIFSSIKKLEKLFKNFDEYSSAGIFVKNGPAISTISKDIFGEWNVIRDKWNAEYDDIHLKKKAVVTEKYEDDRRKSFKKIGSFSLEQLQEYADADLSVVEKLKEIIIQKVDEIYKVYGSSEKLFDADFVLEKSLKKNDAVVAIMKDLLDSVKSFENYIKAFFGEGKETNRDESFYGDFVLAYDILLKVDHIYDAIRNYVTQKPYSKDKFKLYFQNPQFMGGWDKDKETDYRATILRYGSKYYLAIMDKKYAKCLQKIDKDDVNGNYEKINYKLLPGPNKMLPKVFFSKKWMAYYNPSEDIQKIYKNGTFKKGDMFNLNDCHKLIDFFKDSISRYPKWSNAYDFNFSETEKYKDIAGFYREVEEQGYKVSFESASKKEVDKLVEEGKLYMFQIYNKDFSDKSHGTPNLHTMYFKLLFDENNHGQIRLSGGAELFMRRASLKKEELVVHPANSPIANKNPDNPKKTTTLSYDVYKDKRFSEDQYELHIPIAINKCPKNIFKINTEVRVLLKHDDNPYVIGIARGERNLLYIVVVDGKGNIVEQYSLNEIINNFNGIRIKTDYHSLLDKKEKERFEARQNWTSIENIKELKAGYISQVVHKICELVEKYDAVIALEDLNSGFKNSRVKVEKQVYQKFEKMLIDKLNYMVDKKSNPCATGGALKGYQITNKFESFKSMSTQNGFIFYIPAWLTSKIDPSTGFVNLLKTKYTSIADSKKFISSFDRIMYVPEEDLFEFALDYKNFSRTDADYIKKWKLYSYGNRIRIFRNPKKNNVFDWEEVCLTSAYKELFNKYGINYQQGDIRALLCEQSDKAFYSSFMALMSLMLQMRNSITGRTDVDFLISPVKNSDGIFYDSRNYEAQENAILPKNADANGAYNIARKVLWAIGQFKKAEDEKLDKVKIAISNKEWLEYAQTSVKH

SEQ ID NO: 100 - protein, 1454 aa, synthetic construct
SKLEKFTNCYSLSKTLRFKAIPVGKTQENIDNKRLLVEDEKRAEDYKGVKKLLDRYYLSFINDVLHSIKLKNLNNYISLFRKKTRTEKENKELENLEINLRKEIAKAFKGNEGYKSLFKKDIIETILPEFLDDKDEIALVNSFNGFTTAFTGFFDNRENMFSEEAKSTSIAFRCINENLTRYISNMDIFEKVDAIFDKHEVQEIKEKILNSDYDVEDFFEGEFFNFVLTQEGIDVYNAIIGGFVTESGEKIKGLNEYINLYNQKTKQKLPKFKPLYKQVLSDRESLSFYGEGSSGARVRTYPNVSHANTHYKNTVSSKLLPFTANYQLQLGELDNLNRATFSHIQLQDRHETKDVRTKINYDPVGWHNYQFPYGDGSKSSWVMNRGHLVGYQFCGLNDEPRNLVAMTAWLNTGAYSGANDSNPEGMLYYENRLDSWLALHPDFWLDYKVTPIYSGNEVVPRQIELQYVGIDSSGELLTIRLNSNKESIDENGVTTVILENSAPNINLDYLNGTATPKNGYTSDEEVLEVFRNTLNKNSEIFSSIKKLEKLFKNFDEYSSAGIFVKNGPAISTISKDIFGEWNVIRDKWNAEYDDIHLKKKAVVTEKYEDDRRKSFKKIGSFSLEQLQEYADADLSVVEKLKEIIIQKVDEIYKVYGSSEKLFDADFVLEKSLKKNDAVVAIMKDLLDSVKSFENYIKAFFGEGKETNRDESFYGDFVLAYDILLKVDHIYDAIRNYVTQKPYSKDKFKLYFQNPQFMGGWDKDKETDYRATILRYGSKYYLAIMDKKYAKCLQKIDKDDVNGNYEKINYKLLPGPNKMLPKVFFSKKWMAYYNPSEDIQKIYKNGTFKKGDMFNLNDCHKLIDFFKDSISRYPKWSNAYDFNFSETEKYKDIAGFYREVEEQGYKVSFESASKKEVDKLVEEGKLYMFQIYNKDFSDKSHGTPNLHTMYFKLLFDENNHGQIRLSGGAELFMRRASLKKEELVVHPANSPIANKNPDNPKKTTTLSYDVYKDKRFSEDQYELHIPIAINKCPKNIFKINTEVRVLLKHDDNPYVIGIARGERNLLYIVVVDGKGNIVEQYSLNEIINNFNGIRIKTDYHSLLDKKEKERFEARQNWTSIENIKELKAGYISQVVHKICELVEKYDAVIALEDLNSGFKNSRVKVEKQVYQKFEKMLIDKLNYMVDKKSNPCATGGALKGYQITNKFESFKSMSTQNGFIFYIPAWLTSKIDPSTGFVNLLKTKYTSIADSKKFISSFDRIMYVPEEDLFEFALDYKNFSRTDADYIKKWKLYSYGNRIRIFRNPKKNNVFDWEEVCLTSAYKELFNKYGINYQQGDIRALLCEQSDKAFYSSFMALMSLMLQMRNSITGRTDVDFLISPVKNSDGIFYDSRNYEAQENAILPKNADANGAYNIARKVLWAIGQFKKAEDEKLDKVKIAISNKEWLEYAQTSVKH

SEQ ID NO: 101 - protein, 1375 aa, synthetic construct
SKLEKFTNCYSLSKTLRFKAIPVGKTQENIDNKRLLVEDEKRAEDYKGVKKLLDRYYLSFINDVLHSIKLKNLNNYISLFRKKTRTEKENKELENLEINLRKEIAKAFKGNEGYKSLFKKDIIETILPEFLDDKDEIALVNSFNGFTTAFTGFFDNRENMFSEEAKSTSIAFRCINENLTRYISNMDIFEKVDAIFDKHEVQEIKEKILNSDYDVEDFFEGEFFNFVLTQEGIDVYNAIIGGFVTESGEKIKGLNEYINLYNQKTKQKLPKFKPLYKQVLSDRESLSFYGEGSSGENQTTGKGKNNSRPRYKSLEKAIKEFGSQILKEHPTDNQELRNNRLYLYYLQNGKDMYTGQDLDIHNLSNYDIDHIVPQSFITDNSIDNLVLTSSAGNREKGDDVPPLEIVRKRKVFWEKLYQGNLMSKRKFDYLTKAERGGLTGYTSDEEVLEVFRNTLNKNSEIFSSIKKLEKLFKNFDEYSSAGIFVKNGPAISTISKDIFGEWNVIRDKWNAEYDDIHLKKKAVVTEKYEDDRRKSFKKIGSFSLEQLQEYADADLSVVEKLKEIIIQKVDEIYKVYGSSEKLFDADFVLEKSLKKNDAVVAIMKDLLDSVKSFENYIKAFFGEGKETNRDESFYGDFVLAYDILLKVDHIYDAIRNYVTQKPYSKDKFKLYFQNPQFMGGWDKDKETDYRATILRYGSKYYLAIMDKKYAKCLQKIDKDDVNGNYEKINYKLLPGPNKMLPKVFFSKKWMAYYNPSEDIQKIYKNGTFKKGDMFNLNDCHKLIDFFKDSISRYPKWSNAYDFNFSETEKYKDIAGFYREVEEQGYKVSFESASKKEVDKLVEEGKLYMFQIYNKDFSDKSHGTPNLHTMYFKLLFDENNHGQIRLSGGAELFMRRASLKKEELVVHPANSPIANKNPDNPKKTTTLSYDVYKDKRFSEDQYELHIPIAINKCPKNIFKINTEVRVLLKHDDNPYVIGIARGERNLLYIVVVDGKGNIVEQYSLNEIINNFNGIRIKTDYHSLLDKKEKERFEARQNWTSIENIKELKAGYISQVVHKICELVEKYDAVIALEDLNSGFKNSRVKVEKQVYQKFEKMLIDKLNYMVDKKSNPCATGGALKGYQITNKFESFKSMSTQNGFIFYIPAWLTSKIDPSTGFVNLLKTKYTSIADSKKFISSFDRIMYVPEEDLFEFALDYKNFSRTDADYIKKWKLYSYGNRIRIFRNPKKNNVFDWEEVCLTSAYKELFNKYGINYQQGDIRALLCEQSDKAFYSSFMALMSLMLQMRNSITGRTDVDFLISPVKNSDGIFYDSRNYEAQENAILPKNADANGAYNIARKVLWAIGQFKKAEDEKLDKVKIAISNKEWLEYAQTSVKH

SEQ ID NO: 102 - protein, 1375 aa, synthetic construct
SKLEKFTNCYSLSKTLRFKAIPVGKTQENIDNKRLLVEDEKRAEDYKGVKKLLDRYYLSFINDVLHSIKLKNLNNYISLFRKKTRTEKENKELENLEINLRKEIAKAFKGNEGYKSLFKKDIIETILPEFLDDKDEIALVNSFNGFTTAFTGFFDNRENMFSEEAKSTSIAFRCINENLTRYISNMDIFEKVDAIFDKHEVQEIKEKILNSDYDVEDFFEGEFFNFVLTQEGIDVYNAIIGGFVTESGEKIKGLNEYINLYNQKTKQKLPKFKPLYKQVLSDRESLSFYGEGSSGENQFTNQGRRNSQQRLKGLTDSIKEFGSQILKEHPVENSQLQNDRLFLYYLQNGRDMYTGEELDIDYLSQYDIDHIIPQAFIKDNSIDNRVLTSSKENRGKSDDVPSKDVVRKMKSYWSKLLSAKLITQRKFDNLTKAERGGLTGYTSDEEVLEVFRNTLNKNSEIFSSIKKLEKLFKNFDEYSSAGIFVKNGPAISTISKDIFGEWNVIRDKWNAEYDDIHLKKKAVVTEKYEDDRRKSFKKIGSFSLEQLQEYADADLSVVEKLKEIIIQKVDEIYKVYGSSEKLFDADFVLEKSLKKNDAVVAIMKDLLDSVKSFENYIKAFFGEGKETNRDESFYGDFVLAYDILLKVDHIYDAIRNYVTQKPYSKDKFKLYFQNPQFMGGWDKDKETDYRATILRYGSKYYLAIMDKKYAKCLQKIDKDDVNGNYEKINYKLLPGPNKMLPKVFFSKKWMAYYNPSEDIQKIYKNGTFKKGDMFNLNDCHKLIDFFKDSISRYPKWSNAYDFNFSETEKYKDIAGFYREVEEQGYKVSFESASKKEVDKLVEEGKLYMFQIYNKDFSDKSHGTPNLHTMYFKLLFDENNHGQIRLSGGAELFMRRASLKKEELVVHPANSPIANKNPDNPKKTTTLSYDVYKDKRFSEDQYELHIPIAINKCPKNIFKINTEVRVLLKHDDNPYVIGIARGERNLLYIVVVDGKGNIVEQYSLNEIINNFNGIRIKTDYHSLLDKKEKERFEARQNWTSIENIKELKAGYISQVVHKICELVEKYDAVIALEDLNSGFKNSRVKVEKQVYQKFEKMLIDKLNYMVDKKSNPCATGGALKGYQITNKFESFKSMSTQNGFIFYIPAWLTSKIDPSTGFVNLLKTKYTSIADSKKFISSFDRIMYVPEEDLFEFALDYKNFSRTDADYIKKWKLYSYGNRIRIFRNPKKNNVFDWEEVCLTSAYKELFNKYGINYQQGDIRALLCEQSDKAFYSSFMALMSLMLQMRNSITGRTDVDFLISPVKNSDGIFYDSRNYEAQENAILPKNADANGAYNIARKVLWAIGQFKKAEDEKLDKVKIAISNKEWLEYAQTSVKH

SEQ ID NO: 103 - protein, 1398 aa, synthetic construct
SKLEKFTNCYSLSKTLRFKAIPVGKTQENIDNKRLLVEDEKRAEDYKGVKKLLDRYYLSFINDVLHSIKLKNLNNYISLFRKKTRTEKENKELENLEINLRKEIAKAFKGNEGYKSLFKKDIIETILPEFLDDKDEIALVNSFNGFTTAFTGFFDNRENMFSEEAKSTSIAFRCINENLTRYISNMDIFEKVDAIFDKHEVQEIKEKILNSDYDVEDFFEGEFFNFVLTQEGIDVYNAIIGGFVTESGEKIKGLNEYINLYNQKTKQKLPKFKPLYKQVLSDRESLSFYGEGSSGVREGFVTEKRAREMDGDMRRRAARNAKLFQEMQEKLNVQGKPSRADLWRYQSVQRQNCQCAYCGSPITFSNSEMDHIVPRAGQGSTNTRENLVAVCHRCNQSKGNTPFAIWAKNTSIEGVSVKEAVERTRHWVTDTGMRSTDFKKFTKAVVERFQRATMDEEIDARSGYTSDEEVLEVFRNTLNKNSEIFSSIKKLEKLFKNFDEYSSAGIFVKNGPAISTISKDIFGEWNVIRDKWNAEYDDIHLKKKAVVTEKYEDDRRKSFKKIGSFSLEQLQEYADADLSVVEKLKEIIIQKVDEIYKVYGSSEKLFDADFVLEKSLKKNDAVVAIMKDLLDSVKSFENYIKAFFGEGKETNRDESFYGDFVLAYDILLKVDHIYDAIRNYVTQKPYSKDKFKLYFQNPQFMGGWDKDKETDYRATILRYGSKYYLAIMDKKYAKCLQKIDKDDVNGNYEKINYKLLPGPNKMLPKVFFSKKWMAYYNPSEDIQKIYKNGTFKKGDMFNLNDCHKLIDFFKDSISRYPKWSNAYDFNFSETEKYKDIAGFYREVEEQGYKVSFESASKKEVDKLVEEGKLYMFQIYNKDFSDKSHGTPNLHTMYFKLLFDENNHGQIRLSGGAELFMRRASLKKEELVVHPANSPIANKNPDNPKKTTTLSYDVYKDKRFSEDQYELHIPIAINKCPKNIFKINTEVRVLLKHDDNPYVIGIARGERNLLYIVVVDGKGNIVEQYSLNEIINNFNGIRIKTDYHSLLDKKEKERFEARQNWTSIENIKELKAGYISQVVHKICELVEKYDAVIALEDLNSGFKNSRVKVEKQVYQKFEKMLIDKLNYMVDKKSNPCATGGALKGYQITNKFESFKSMSTQNGFIFYIPAWLTSKIDPSTGFVNLLKTKYTSIADSKKFISSFDRIMYVPEEDLFEFALDYKNFSRTDADYIKKWKLYSYGNRIRIFRNPKKNNVFDWEEVCLTSAYKELFNKYGINYQQGDIRALLCEQSDKAFYSSFMALMSLMLQMRNSITGRTDVDFLISPVKNSDGIFYDSRNYEAQENAILPKNADANGAYNIARKVLWAIGQFKKAEDEKLDKVKIAISNKEWLEYAQTSVKH

SEQ ID NO: 104 - protein, 1491 aa, synthetic construct
SKLEKFTNCYSLSKTLRFKAIPVGKTQENIDNKRLLVEDEKRAEDYKGVKKLLDRYYLSFINDVLHSIKLKNLNNYISLFRKKTRTEKENKELENLEINLRKEIAKAFKGNEGYKSLFKKDIIETILPEFLDDKDEIALVNSFNGFTTAFTGFFDNRENMFSEEAKSTSIAFRCINENLTRYISNMDIFEKVDAIFDKHEVQEIKEKILNSDYDVEDFFEGEFFNFVLTQEGIDVYNAIIGGFVTESGEKIKGLNEYINLYNQKTKQKLPKFKPLYKQVLSDRESLSFYGEGSSGGKAQLDIKNFPELYRTTERVYKKSGQSTKPVTVSNIHYSVLDGYGRSGEAYGIITKDMIDMSAGYREKWESKPEPSGWYSYFFKNTNQRATESDYKHSPKNVSKISNNIKASILLSNGNVRNGYLFDRSHLIADSLGGRPFRNNLITGTRTQNVGNNDRKGGMQYIENKVLDHIKRNPKVHVYYKATPVYQGSELLPRAVLVSALSSDGFIDETVRVFNNVAGFNIDYQNGGLLSSTADVDINNVEENEIETTDDEIEEGGYTSDEEVLEVFRNTLNKNSEIFSSIKKLEKLFKNFDEYSSAGIFVKNGPAISTISKDIFGEWNVIRDKWNAEYDDIHLKKKAVVTEKYEDDRRKSFKKIGSFSLEQLQEYADADLSVVEKLKEIIIQKVDEIYKVYGSSEKLFDADFVLEKSLKKNDAVVAIMKDLLDSVKSFENYIKAFFGEGKETNRDESFYGDFVLAYDILLKVDHIYDAIRNYVTQKPYSKDKFKLYFQNPQFMGGWDKDKETDYRATILRYGSKYYLAIMDKKYAKCLQKIDKDDVNGNYEKINYKLLPGPNKMLPKVFFSKKWMAYYNPSEDIQKIYKNGTFKKGDMFNLNDCHKLIDFFKDSISRYPKWSNAYDFNFSETEKYKDIAGFYREVEEQGYKVSFESASKKEVDKLVEEGKLYMFQIYNKDFSDKSHGTPNLHTMYFKLLFDENNHGQIRLSGGAELFMRRASLKKEELVVHPANSPIANKNPDNPKKTTTLSYDVYKDKRFSEDQYELHIPIAINKCPKNIFKINTEVRVLLKHDDNPYVIGIARGERNLLYIVVVDGKGNIVEQYSLNEIINNFNGIRIKTDYHSLLDKKEKERFEARQNWTSIENIKELKAGYISQVVHKICELVEKYDAVIALEDLNSGFKNSRVKVEKQVYQKFEKMLIDKLNYMVDKKSNPCATGGALKGYQITNKFESFKSMSTQNGFIFYIPAWLTSKIDPSTGFVNLLKTKYTSIADSKKFISSFDRIMYVPEEDLFEFALDYKNFSRTDADYIKKWKLYSYGNRIRIFRNPKKNNVFDWEEVCLTSAYKELFNKYGINYQQGDIRALLCEQSDKAFYSSFMALMSLMLQMRNSITGRTDVDFLISPVKNSDGIFYDSRNYEAQENAILPKNADANGAYNIARKVLWAIGQFKKAEDEKLDKVKIAISNKEWLEYAQTSVKH

SEQ ID NO: 105 - protein, 1351 aa, synthetic construct
SKLEKFTNCYSLSKTLRFKAIPVGKTQENIDNKRLLVEDEKRAEDYKGVKKLLDRYYLSFINDVLHSIKLKNLNNYISLFRKKTRTEKENKELENLEINLRKEIAKAFKGNEGYKSLFKKDIIETILPEFLDDKDEIALVNSFNGFTTAFTGFFDNRENMFSEEAKSTSIAFRCINENLTRYISNMDIFEKVDAIFDKHEVQEIKEKILNSDYDVEDFFEGEFFNFVLTQEGIDVYNAIIGGFVTESGEKIKGLNEYINLYNQKTKQKLPKFKPLYKQVLSDRESLSFYGEGSSGSNNSYLRAKVFETEHGVCQLCNVNAQELFLRLRDAPKSQRKNLLYATWTSKLPLEQLNEMIRNPGEGHFWQVDHIKPVYGGGGQCSLDNLQTLCTVCHKERTARQAKERSQVRRQSLASKGYTSDEEVLEVFRNTLNKNSEIFSSIKKLEKLFKNFDEYSSAGIFVKNGPAISTISKDIFGEWNVIRDKWNAEYDDIHLKKKAVVTEKYEDDRRKSFKKIGSFSLEQLQEYADADLSVVEKLKEIIIQKVDEIYKVYGSSEKLFDADFVLEKSLKKNDAVVAIMKDLLDSVKSFENYIKAFFGEGKETNRDESFYGDFVLAYDILLKVDHIYDAIRNYVTQKPYSKDKFKLYFQNPQFMGGWDKDKETDYRATILRYGSKYYLAIMDKKYAKCLQKIDKDDVNGNYEKINYKLLPGPNKMLPKVFFSKKWMAYYNPSEDIQKIYKNGTFKKGDMFNLNDCHKLIDFFKDSISRYPKWSNAYDFNFSETEKYKDIAGFYREVEEQGYKVSFESASKKEVDKLVEEGKLYMFQIYNKDFSDKSHGTPNLHTMYFKLLFDENNHGQIRLSGGAELFMRRASLKKEELVVHPANSPIANKNPDNPKKTTTLSYDVYKDKRFSEDQYELHIPIAINKCPKNIFKINTEVRVLLKHDDNPYVIGIARGERNLLYIVVVDGKGNIVEQYSLNEIINNFNGIRIKTDYHSLLDKKEKERFEARQNWTSIENIKELKAGYISQVVHKICELVEKYDAVIALEDLNSGFKNSRVKVEKQVYQKFEKMLIDKLNYMVDKKSNPCATGGALKGYQITNKFESFKSMSTQNGFIFYIPAWLTSKIDPSTGFVNLLKTKYTSIADSKKFISSFDRIMYVPEEDLFEFALDYKNFSRTDADYIKKWKLYSYGNRIRIFRNPKKNNVFDWEEVCLTSAYKELFNKYGINYQQGDIRALLCEQSDKAFYSSFMALMSLMLQMRNSITGRTDVDFLISPVKNSDGIFYDSRNYEAQENAILPKNADANGAYNIARKVLWAIGQFKKAEDEKLDKVKIAISNKEWLEYAQTSVKH

SEQ ID NO: 106 - protein, 1367 aa, synthetic construct
SKLEKFTNCYSLSKTLRFKAIPVGKTQENIDNKRLLVEDEKRAEDYKGVKKLLDRYYLSFINDVLHSIKLKNLNNYISLFRKKTRTEKENKELENLEINLRKEIAKAFKGNEGYKSLFKKDIIETILPEFLDDKDEIALVNSFNGFTTAFTGFFDNRENMFSEEAKSTSIAFRCINENLTRYISNMDIFEKVDAIFDKHEVQEIKEKILNSDYDVEDFFEGEFFNFVLTQEGIDVYNAIIGGFVTESGEKIKGLNEYINLYNQKTKQKLPKFKPLYKQVLSDRESLSFYGEGSSGDEPGVATGNGQPVTGNWLAGASQGDGVPIPSQIADQLRGKEFKSWRDFREQFWMAVSKDPSALENLSPSNRYFVSQGLAPYAVPEEHLGSKEKFEIHHVVPLESGGALYNIDNLVIVTPKRHSEIHKELKLKRKEKGYTSDEEVLEVFRNTLNKNSEIFSSIKKLEKLFKNFDEYSSAGIFVKNGPAISTISKDIFGEWNVIRDKWNAEYDDIHLKKKAVVTEKYEDDRRKSFKKIGSFSLEQLQEYADADLSVVEKLKEIIIQKVDEIYKVYGSSEKLFDADFVLEKSLKKNDAVVAIMKDLLDSVKSFENYIKAFFGEGKETNRDESFYGDFVLAYDILLKVDHIYDAIRNYVTQKPYSKDKFKLYFQNPQFMGGWDKDKETDYRATILRYGSKYYLAIMDKKYAKCLQKIDKDDVNGNYEKINYKLLPGPNKMLPKVFFSKKWMAYYNPSEDIQKIYKNGTFKKGDMFNLNDCHKLIDFFKDSISRYPKWSNAYDFNFSETEKYKDIAGFYREVEEQGYKVSFESASKKEVDKLVEEGKLYMFQIYNKDFSDKSHGTPNLHTMYFKLLFDENNHGQIRLSGGAELFMRRASLKKEELVVHPANSPIANKNPDNPKKTTTLSYDVYKDKRFSEDQYELHIPIAINKCPKNIFKINTEVRVLLKHDDNPYVIGIARGERNLLYIVVVDGKGNIVEQYSLNEIINNFNGIRIKTDYHSLLDKKEKERFEARQNWTSIENIKELKAGYISQVVHKICELVEKYDAVIALEDLNSGFKNSRVKVEKQVYQKFEKMLIDKLNYMVDKKSNPCATGGALKGYQITNKFESFKSMSTQNGFIFYIPAWLTSKIDPSTGFVNLLKTKYTSIADSKKFISSFDRIMYVPEEDLFEFALDYKNFSRTDADYIKKWKLYSYGNRIRIFRNPKKNNVFDWEEVCLTSAYKELFNKYGINYQQGDIRALLCEQSDKAFYSSFMALMSLMLQMRNSITGRTDVDFLISPVKNSDGIFYDSRNYEAQENAILPKNADANGAYNIARKVLWAIGQFKKAEDEKLDKVKIAISNKEWLEYAQTSVKH

SEQ ID NO: 107 - protein, 1299 aa, synthetic construct
SKLEKFTNCYSLSKTLRFKAIPVGKTQENIDNKRLLVEDEKRAEDYKGVKKLLDRYYLSFINDVLHSIKLKNLNNYISLFRKKTRTEKENKELENLEINLRKEIAKAFKGNEGYKSLFKKDIIETILPEFLDDKDEIALVNSFNGFTTAFTGFFDNRENMFSEEAKSTSIAFRCINENLTRYISNMDIFEKVDAIFDKHEVQEIKEKILNSDYDVEDFFEGEFFNFVLTQEGIDVYNAIIGGFVTESGEKIKGLNEYINLYNQKTKQKLPKFKPLYKQVLSDRESLSFYGEGSSGRLREQALMRDKGLCLHCKNNRKIKVADMVDHIIPIKVDPSLKLKLENLQSLCNPCHNRKTAEDKKKYGGYTSDEEVLEVFRNTLNKNSEIFSSIKKLEKLFKNFDEYSSAGIFVKNGPAISTISKDIFGEWNVIRDKWNAEYDDIHLKKKAVVTEKYEDDRRKSFKKIGSFSLEQLQEYADADLSVVEKLKEIIIQKVDEIYKVYGSSEKLFDADFVLEKSLKKNDAVVAIMKDLLDSVKSFENYIKAFFGEGKETNRDESFYGDFVLAYDILLKVDHIYDAIRNYVTQKPYSKDKFKLYFQNPQFMGGWDKDKETDYRATILRYGSKYYLAIMDKKYAKCLQKIDKDDVNGNYEKINYKLLPGPNKMLPKVFFSKKWMAYYNPSEDIQKIYKNGTFKKGDMFNLNDCHKLIDFFKDSISRYPKWSNAYDFNFSETEKYKDIAGFYREVEEQGYKVSFESASKKEVDKLVEEGKLYMFQIYNKDFSDKSHGTPNLHTMYFKLLFDENNHGQIRLSGGAELFMRRASLKKEELVVHPANSPIANKNPDNPKKTTTLSYDVYKDKRFSEDQYELHIPIAINKCPKNIFKINTEVRVLLKHDDNPYVIGIARGERNLLYIVVVDGKGNIVEQYSLNEIINNFNGIRIKTDYHSLLDKKEKERFEARQNWTSIENIKELKAGYISQVVHKICELVEKYDAVIALEDLNSGFKNSRVKVEKQVYQKFEKMLIDKLNYMVDKKSNPCATGGALKGYQITNKFESFKSMSTQNGFIFYIPAWLTSKIDPSTGFVNLLKTKYTSIADSKKFISSFDRIMYVPEEDLFEFALDYKNFSRTDADYIKKWKLYSYGNRIRIFRNPKKNNVFDWEEVCLTSAYKELFNKYGINYQQGDIRALLCEQSDKAFYSSFMALMSLMLQMRNSITGRTDVDFLISPVKNSDGIFYDSRNYEAQENAILPKNADANGAYNIARKVLWAIGQFKKAEDEKLDKVKIAISNKEWLEYAQTSVKH

SEQ ID NO: 108 - protein, 1328 aa, synthetic construct
SKLEKFTNCYSLSKTLRFKAIPVGKTQENIDNKRLLVEDEKRAEDYKGVKKLLDRYYLSFINDVLHSIKLKNLNNYISLFRKKTRTEKENKELENLEINLRKEIAKAFKGNEGYKSLFKKDIIETILPEFLDDKDEIALVNSFNGFTTAFTGFFDNRENMFSEEAKSTSIAFRCINENLTRYISNMDIFEKVDAIFDKHEVQEIKEKILNSDYDVEDFFEGEFFNFVLTQEGIDVYNAIIGGFVTESGEKIKGLNEYINLYNQKTKQKLPKFKPLYKQVLSDRESLSFYGEGSSGMNYFIVEVSEQEVKREKEKARELRRSQWWKNRIARGICHYCGEIFPPEELTMDHLVPVVRGGKSTRGNVVPACKECNNRKKYLLPVEWEEYLDSLESGYTSDEEVLEVFRNTLNKNSEIFSSIKKLEKLFKNFDEYSSAGIFVKNGPAISTISKDIFGEWNVIRDKWNAEYDDIHLKKKAVVTEKYEDDRRKSFKKIGSFSLEQLQEYADADLSVVEKLKEIIIQKVDEIYKVYGSSEKLFDADFVLEKSLKKNDAVVAIMKDLLDSVKSFENYIKAFFGEGKETNRDESFYGDFVLAYDILLKVDHIYDAIRNYVTQKPYSKDKFKLYFQNPQFMGGWDKDKETDYRATILRYGSKYYLAIMDKKYAKCLQKIDKDDVNGNYEKINYKLLPGPNKMLPKVFFSKKWMAYYNPSEDIQKIYKNGTFKKGDMFNLNDCHKLIDFFKDSISRYPKWSNAYDFNFSETEKYKDIAGFYREVEEQGYKVSFESASKKEVDKLVEEGKLYMFQIYNKDFSDKSHGTPNLHTMYFKLLFDENNHGQIRLSGGAELFMRRASLKKEELVVHPANSPIANKNPDNPKKTTTLSYDVYKDKRFSEDQYELHIPIAINKCPKNIFKINTEVRVLLKHDDNPYVIGIARGERNLLYIVVVDGKGNIVEQYSLNEIINNFNGIRIKTDYHSLLDKKEKERFEARQNWTSIENIKELKAGYISQVVHKICELVEKYDAVIALEDLNSGFKNSRVKVEKQVYQKFEKMLIDKLNYMVDKKSNPCATGGALKGYQITNKFESFKSMSTQNGFIFYIPAWLTSKIDPSTGFVNLLKTKYTSIADSKKFISSFDRIMYVPEEDLFEFALDYKNFSRTDADYIKKWKLYSYGNRIRIFRNPKKNNVFDWEEVCLTSAYKELFNKYGINYQQGDIRALLCEQSDKAFYSSFMALMSLMLQMRNSITGRTDVDFLISPVKNSDGIFYDSRNYEAQENAILPKNADANGAYNIARKVLWAIGQFKKAEDEKLDKVKIAISNKEWLEYAQTSVKH

SEQ ID NO: 109 - protein, 1441 aa, synthetic construct
SKLEKFTNCYSLSKTLRFKAIPVGKTQENIDNKRLLVEDEKRAEDYKGVKKLLDRYYLSFINDVLHSIKLKNLNNYISLFRKKTRTEKENKELENLEINLRKEIAKAFKGNEGYKSLFKKDIIETILPEFLDDKDEIALVNSFNGFTTAFTGFFDNRENMFSEEAKSTSIAFRCINENLTRYISNMDIFEKVDAIFDKHEVQEIKEKILNSDYDVEDFFEGEFFNFVLTQEGIDVYNAIIGGFVTESGEKIKGLNEYINLYNQKTKQKLPKFKPLYKQVLSDRESLSFYGEGSSGPPSSFSKAKKEAVKIYLDYPTSFYCGCDITWKNKKKGIPELESCGYQVRKQEKRASRIEWEHVVPAWQFGHQRQCWQKGGRKNCTRNDKQFKSMEADLHNLVPAIGEVNGDRSNFRFSQWNGSKGAFYGQCAFKVDFKGRVAEPPAQSRGAIARTYLYMNNEYKFNLSKAQRQLMEAWNKQYPVSTWECTRDERIAKIQGNHNQFVYKACGYTSDEEVLEVFRNTLNKNSEIFSSIKKLEKLFKNFDEYSSAGIFVKNGPAISTISKDIFGEWNVIRDKWNAEYDDIHLKKKAVVTEKYEDDRRKSFKKIGSFSLEQLQEYADADLSVVEKLKEIIIQKVDEIYKVYGSSEKLFDADFVLEKSLKKNDAVVAIMKDLLDSVKSFENYIKAFFGEGKETNRDESFYGDFVLAYDILLKVDHIYDAIRNYVTQKPYSKDKFKLYFQNPQFMGGWDKDKETDYRATILRYGSKYYLAIMDKKYAKCLQKIDKDDVNGNYEKINYKLLPGPNKMLPKVFFSKKWMAYYNPSEDIQKIYKNGTFKKGDMFNLNDCHKLIDFFKDSISRYPKWSNAYDFNFSETEKYKDIAGFYREVEEQGYKVSFESASKKEVDKLVEEGKLYMFQIYNKDFSDKSHGTPNLHTMYFKLLFDENNHGQIRLSGGAELFMRRASLKKEELVVHPANSPIANKNPDNPKKTTTLSYDVYKDKRFSEDQYELHIPIAINKCPKNIFKINTEVRVLLKHDDNPYVIGIARGERNLLYIVVVDGKGNIVEQYSLNEIINNFNGIRIKTDYHSLLDKKEKERFEARQNWTSIENIKELKAGYISQVVHKICELVEKYDAVIALEDLNSGFKNSRVKVEKQVYQKFEKMLIDKLNYMVDKKSNPCATGGALKGYQITNKFESFKSMSTQNGFIFYIPAWLTSKIDPSTGFVNLLKTKYTSIADSKKFISSFDRIMYVPEEDLFEFALDYKNFSRTDADYIKKWKLYSYGNRIRIFRNPKKNNVFDWEEVCLTSAYKELFNKYGINYQQGDIRALLCEQSDKAFYSSFMALMSLMLQMRNSITGRTDVDFLISPVKNSDGIFYDSRNYEAQENAILPKNADANGAYNIARKVLWAIGQFKKAEDEKLDKVKIAISNKEWLEYAQTSVKH

SEQ ID NO: 110 - protein, 1506 aa, synthetic construct
SKLEKFTNCYSLSKTLRFKAIPVGKTQENIDNKRLLVEDEKRAEDYKGVKKLLDRYYLSFINDVLHSIKLKNLNNYISLFRKKTRTEKENKELENLEINLRKEIAKAFKGNEGYKSLFKKDIIETILPEFLDDKDEIALVNSFNGFTTAFTGFFDNRENMFSEEAKSTSIAFRCINENLTRYISNMDIFEKVDAIFDKHEVQEIKEKILNSDYDVEDFFEGEFFNFVLTQEGIDVYNAIIGGFVTESGEKIKGLNEYINLYNQKTKQKLPKFKPLYKQVLSDRESLSFYGEGSSGWRRRREDARAAPGLLGRLPVLPVAAAAELPPVPGGPRGPGELAKYGLPGLAQLKSRESYVLCYDPRTRGALWVVEQLRPERLRGDGDRRECDFREDDSVHAYHRATNADYRGSGFDRGHLAAAANHRWSQKAMDDTFYLSNVAPQVPHLNQNAWNNLEKYSRSLTRSYQNVYVCTGPLFLPRTEADGKSYVKYQVIGKNHVAVPTHFFKVLILEAAGGQIELRTYVMPNAPVDEAIPLERFLVPIESIERASGLLFVPNILARAGSLKAITAGSKGYTSDEEVLEVFRNTLNKNSEIFSSIKKLEKLFKNFDEYSSAGIFVKNGPAISTISKDIFGEWNVIRDKWNAEYDDIHLKKKAVVTEKYEDDRRKSFKKIGSFSLEQLQEYADADLSVVEKLKEIIIQKVDEIYKVYGSSEKLFDADFVLEKSLKKNDAVVAIMKDLLDSVKSFENYIKAFFGEGKETNRDESFYGDFVLAYDILLKVDHIYDAIRNYVTQKPYSKDKFKLYFQNPQFMGGWDKDKETDYRATILRYGSKYYLAIMDKKYAKCLQKIDKDDVNGNYEKINYKLLPGPNKMLPKVFFSKKWMAYYNPSEDIQKIYKNGTFKKGDMFNLNDCHKLIDFFKDSISRYPKWSNAYDFNFSETEKYKDIAGFYREVEEQGYKVSFESASKKEVDKLVEEGKLYMFQIYNKDFSDKSHGTPNLHTMYFKLLFDENNHGQIRLSGGAELFMRRASLKKEELVVHPANSPIANKNPDNPKKTTTLSYDVYKDKRFSEDQYELHIPIAINKCPKNIFKINTEVRVLLKHDDNPYVIGIARGERNLLYIVVVDGKGNIVEQYSLNEIINNFNGIRIKTDYHSLLDKKEKERFEARQNWTSIENIKELKAGYISQVVHKICELVEKYDAVIALEDLNSGFKNSRVKVEKQVYQKFEKMLIDKLNYMVDKKSNPCATGGALKGYQITNKFESFKSMSTQNGFIFYIPAWLTSKIDPSTGFVNLLKTKYTSIADSKKFISSFDRIMYVPEEDLFEFALDYKNFSRTDADYIKKWKLYSYGNRIRIFRNPKKNNVFDWEEVCLTSAYKELFNKYGINYQQGDIRALLCEQSDKAFYSSFMALMSLMLQMRNSITGRTDVDFLISPVKNSDGIFYDSRNYEAQENAILPKNADANGAYNIARKVLWAIGQFKKAEDEKLDKVKIAISNKEWLEYAQTSVKH

SEQ ID NO: 111 - protein, 1508 aa, synthetic construct
SKLEKFTNCYSLSKTLRFKAIPVGKTQENIDNKRLLVEDEKRAEDYKGVKKLLDRYYLSFINDVLHSIKLKNLNNYISLFRKKTRTEKENKELENLEINLRKEIAKAFKGNEGYKSLFKKDIIETILPEFLDDKDEIALVNSFNGFTTAFTGFFDNRENMFSEEAKSTSIAFRCINENLTRYISNMDIFEKVDAIFDKHEVQEIKEKILNSDYDVEDFFEGEFFNFVLTQEGIDVYNAIIGGFVTESGEKIKGLNEYINLYNQKTKQKLPKFKPLYKQVLSDRESLSFYGEGSSGWSKEGHVMTCRIAQGLLNDEAAHAVKMLLPEYVNGDLSALCVWPDQVRHWYKYKWTSPLHFIDTPDKACNFDYERDCHDQHGVKDMCVAGAIQNFTTQLSHYREGTSDRRYNMTEALLFLSHFMGDIHQPMHVGFTSDAGGNSIDLRWFRHKSNLHHVWDREIILTAAKDYYAKDINLLEEDIEGNFTDGIWSDDLASWRECGNVFSCVNKFATESINIACKWGYKGVEAGETLSDDYFNSRLPIVMKRVAQGGIRLAMLLNNVFGASQQEDSVVATGYTSDEEVLEVFRNTLNKNSEIFSSIKKLEKLFKNFDEYSSAGIFVKNGPAISTISKDIFGEWNVIRDKWNAEYDDIHLKKKAVVTEKYEDDRRKSFKKIGSFSLEQLQEYADADLSVVEKLKEIIIQKVDEIYKVYGSSEKLFDADFVLEKSLKKNDAVVAIMKDLLDSVKSFENYIKAFFGEGKETNRDESFYGDFVLAYDILLKVDHIYDAIRNYVTQKPYSKDKFKLYFQNPQFMGGWDKDKETDYRATILRYGSKYYLAIMDKKYAKCLQKIDKDDVNGNYEKINYKLLPGPNKMLPKVFFSKKWMAYYNPSEDIQKIYKNGTFKKGDMFNLNDCHKLIDFFKDSISRYPKWSNAYDFNFSETEKYKDIAGFYREVEEQGYKVSFESASKKEVDKLVEEGKLYMFQIYNKDFSDKSHGTPNLHTMYFKLLFDENNHGQIRLSGGAELFMRRASLKKEELVVHPANSPIANKNPDNPKKTTTLSYDVYKDKRFSEDQYELHIPIAINKCPKNIFKINTEVRVLLKHDDNPYVIGIARGERNLLYIVVVDGKGNIVEQYSLNEIINNFNGIRIKTDYHSLLDKKEKERFEARQNWTSIENIKELKAGYISQVVHKICELVEKYDAVIALEDLNSGFKNSRVKVEKQVYQKFEKMLIDKLNYMVDKKSNPCATGGALKGYQITNKFESFKSMSTQNGFIFYIPAWLTSKIDPSTGFVNLLKTKYTSIADSKKFISSFDRIMYVPEEDLFEFALDYKNFSRTDADYIKKWKLYSYGNRIRIFRNPKKNNVFDWEEVCLTSAYKELFNKYGINYQQGDIRALLCEQSDKAFYSSFMALMSLMLQMRNSITGRTDVDFLISPVKNSDGIFYDSRNYEAQENAILPKNADANGAYNIARKVLWAIGQFKKAEDEKLDKVKIAISNKEWLEYAQTSVKH

SEQ ID NO: 112 - protein, 1318 aa, synthetic construct
SKLEKFTNCYSLSKTLRFKAIPVGKTQENIDNKRLLVEDEKRAEDYKGVKKLLDRYYLSFINDVLHSIKLKNLNNYISLFRKKTRTEKENKELENLEINLRKEIAKAFKGNEGYKSLFKKDIIETILPEFLDDKDEIALVNSFNGFTTAFTGFFDNRENMFSEEAKSTSIAFRCINENLTRYISNMDIFEKVDAIFDKHEVQEIKEKILNSDYDVEDFFEGEFFNFVLTQEGIDVYNAIIGGFVTESGEKIKGLNEYINLYNQKTKQKLPKFKPLYKQVLSDRESLSFYGEGSSGMKSKISEYTEKEFLEFVKDIYTNNKKKFPTEESHIQAVLEFKKLTEHPSGSDLLYYPNENREDSPAGVVKEVKEWRASKGLPGFKAGGYTSDEEVLEVFRNTLNKNSEIFSSIKKLEKLFKNFDEYSSAGIFVKNGPAISTISKDIFGEWNVIRDKWNAEYDDIHLKKKAVVTEKYEDDRRKSFKKIGSFSLEQLQEYADADLSVVEKLKEIIIQKVDEIYKVYGSSEKLFDADFVLEKSLKKNDAVVAIMKDLLDSVKSFENYIKAFFGEGKETNRDESFYGDFVLAYDILLKVDHIYDAIRNYVTQKPYSKDKFKLYFQNPQFMGGWDKDKETDYRATILRYGSKYYLAIMDKKYAKCLQKIDKDDVNGNYEKINYKLLPGPNKMLPKVFFSKKWMAYYNPSEDIQKIYKNGTFKKGDMFNLNDCHKLIDFFKDSISRYPKWSNAYDFNFSETEKYKDIAGFYREVEEQGYKVSFESASKKEVDKLVEEGKLYMFQIYNKDFSDKSHGTPNLHTMYFKLLFDENNHGQIRLSGGAELFMRRASLKKEELVVHPANSPIANKNPDNPKKTTTLSYDVYKDKRFSEDQYELHIPIAINKCPKNIFKINTEVRVLLKHDDNPYVIGIARGERNLLYIVVVDGKGNIVEQYSLNEIINNFNGIRIKTDYHSLLDKKEKERFEARQNWTSIENIKELKAGYISQVVHKICELVEKYDAVIALEDLNSGFKNSRVKVEKQVYQKFEKMLIDKLNYMVDKKSNPCATGGALKGYQITNKFESFKSMSTQNGFIFYIPAWLTSKIDPSTGFVNLLKTKYTSIADSKKFISSFDRIMYVPEEDLFEFALDYKNFSRTDADYIKKWKLYSYGNRIRIFRNPKKNNVFDWEEVCLTSAYKELFNKYGINYQQGDIRALLCEQSDKAFYSSFMALMSLMLQMRNSITGRTDVDFLISPVKNSDGIFYDSRNYEAQENAILPKNADANGAYNIARKVLWAIGQFKKAEDEKLDKVKIAISNKEWLEYAQTSVKH

SEQ ID NO: 113 - protein, 1318 aa, synthetic construct
SKLEKFTNCYSLSKTLRFKAIPVGKTQENIDNKRLLVEDEKRAEDYKGVKKLLDRYYLSFINDVLHSIKLKNLNNYISLFRKKTRTEKENKELENLEINLRKEIAKAFKGNEGYKSLFKKDIIETILPEFLDDKDEIALVNSFNGFTTAFTGFFDNRENMFSEEAKSTSIAFRCINENLTRYISNMDIFEKVDAIFDKHEVQEIKEKILNSDYDVEDFFEGEFFNFVLTQEGIDVYNAIIGGFVTESGEKIKGLNEYINLYNQKTKQKLPKFKPLYKQVLSDRESLSFYGEGSSGMELKNSISDYTEAEFVQLLKEIEKENVAATDDVLDVLLEHFVKITEHPDGTDLIYYPSDNRDDSPEGIVKEIKEWRAANGKPGFKQGGYTSDEEVLEVFRNTLNKNSEIFSSIKKLEKLFKNFDEYSSAGIFVKNGPAISTISKDIFGEWNVIRDKWNAEYDDIHLKKKAVVTEKYEDDRRKSFKKIGSFSLEQLQEYADADLSVVEKLKEIIIQKVDEIYKVYGSSEKLFDADFVLEKSLKKNDAVVAIMKDLLDSVKSFENYIKAFFGEGKETNRDESFYGDFVLAYDILLKVDHIYDAIRNYVTQKPYSKDKFKLYFQNPQFMGGWDKDKETDYRATILRYGSKYYLAIMDKKYAKCLQKIDKDDVNGNYEKINYKLLPGPNKMLPKVFFSKKWMAYYNPSEDIQKIYKNGTFKKGDMFNLNDCHKLIDFFKDSISRYPKWSNAYDFNFSETEKYKDIAGFYREVEEQGYKVSFESASKKEVDKLVEEGKLYMFQIYNKDFSDKSHGTPNLHTMYFKLLFDENNHGQIRLSGGAELFMRRASLKKEELVVHPANSPIANKNPDNPKKTTTLSYDVYKDKRFSEDQYELHIPIAINKCPKNIFKINTEVRVLLKHDDNPYVIGIARGERNLLYIVVVDGKGNIVEQYSLNEIINNFNGIRIKTDYHSLLDKKEKERFEARQNWTSIENIKELKAGYISQVVHKICELVEKYDAVIALEDLNSGFKNSRVKVEKQVYQKFEKMLIDKLNYMVDKKSNPCATGGALKGYQITNKFESFKSMSTQNGFIFYIPAWLTSKIDPSTGFVNLLKTKYTSIADSKKFISSFDRIMYVPEEDLFEFALDYKNFSRTDADYIKKWKLYSYGNRIRIFRNPKKNNVFDWEEVCLTSAYKELFNKYGINYQQGDIRALLCEQSDKAFYSSFMALMSLMLQMRNSITGRTDVDFLISPVKNSDGIFYDSRNYEAQENAILPKNADANGAYNIARKVLWAIGQFKKAEDEKLDKVKIAISNKEWLEYAQTSVKH

SEQ ID NO: 114 - protein, 1341 aa, synthetic construct
SKLEKFTNCYSLSKTLRFKAIPVGKTQENIDNKRLLVEDEKRAEDYKGVKKLLDRYYLSFINDVLHSIKLKNLNNYISLFRKKTRTEKENKELENLEINLRKEIAKAFKGNEGYKSLFKKDIIETILPEFLDDKDEIALVNSFNGFTTAFTGFFDNRENMFSEEAKSTSIAFRCINENLTRYISNMDIFEKVDAIFDKHEVQEIKEKILNSDYDVEDFFEGEFFNFVLTQEGIDVYNAIIGGFVTESGEKIKGLNEYINLYNQKTKQKLPKFKPLYKQVLSDRESLSFYGEGSSGGRTPTAEERRIANALGALPCIACYMHGVISNEVSLHHIAGRTAPGCHKKQLPLCRWHHQHAAPAEVREKYPWLVPVHADGVVGGKKEFTLLNKSEMELLADAYEMANIMHGYTSDEEVLEVFRNTLNKNSEIFSSIKKLEKLFKNFDEYSSAGIFVKNGPAISTISKDIFGEWNVIRDKWNAEYDDIHLKKKAVVTEKYEDDRRKSFKKIGSFSLEQLQEYADADLSVVEKLKEIIIQKVDEIYKVYGSSEKLFDADFVLEKSLKKNDAVVAIMKDLLDSVKSFENYIKAFFGEGKETNRDESFYGDFVLAYDILLKVDHIYDAIRNYVTQKPYSKDKFKLYFQNPQFMGGWDKDKETDYRATILRYGSKYYLAIMDKKYAKCLQKIDKDDVNGNYEKINYKLLPGPNKMLPKVFFSKKWMAYYNPSEDIQKIYKNGTFKKGDMFNLNDCHKLIDFFKDSISRYPKWSNAYDFNFSETEKYKDIAGFYREVEEQGYKVSFESASKKEVDKLVEEGKLYMFQIYNKDFSDKSHGTPNLHTMYFKLLFDENNHGQIRLSGGAELFMRRASLKKEELVVHPANSPIANKNPDNPKKTTTLSYDVYKDKRFSEDQYELHIPIAINKCPKNIFKINTEVRVLLKHDDNPYVIGIARGERNLLYIVVVDGKGNIVEQYSLNEIINNFNGIRIKTDYHSLLDKKEKERFEARQNWTSIENIKELKAGYISQVVHKICELVEKYDAVIALEDLNSGFKNSRVKVEKQVYQKFEKMLIDKLNYMVDKKSNPCATGGALKGYQITNKFESFKSMSTQNGFIFYIPAWLTSKIDPSTGFVNLLKTKYTSIADSKKFISSFDRIMYVPEEDLFEFALDYKNFSRTDADYIKKWKLYSYGNRIRIFRNPKKNNVFDWEEVCLTSAYKELFNKYGINYQQGDIRALLCEQSDKAFYSSFMALMSLMLQMRNSITGRTDVDFLISPVKNSDGIFYDSRNYEAQENAILPKNADANGAYNIARKVLWAIGQFKKAEDEKLDKVKIAISNKEWLEYAQTSVKH

SEQ ID NO: 115 - protein, 1336 aa, synthetic construct
SKLEKFTNCYSLSKTLRFKAIPVGKTQENIDNKRLLVEDEKRAEDYKGVKKLLDRYYLSFINDVLHSIKLKNLNNYISLFRKKTRTEKENKELENLEINLRKEIAKAFKGNEGYKSLFKKDIIETILPEFLDDKDEIALVNSFNGFTTAFTGFFDNRENMFSEEAKSTSIAFRCINENLTRYISNMDIFEKVDAIFDKHEVQEIKEKILNSDYDVEDFFEGEFFNFVLTQEGIDVYNAIIGGFVTESGEKIKGLNEYINLYNQKTKQKLPKFKPLYKQVLSDRESLSFYGEGSSGMEWKDIKGYEGHYQVSNTGEVYSIKSGKTLKHQIPKDGYHRIGLFKGGKGKTFQVHRLVAIHFCEGYEEGLVVDHKDGNKDNNLSTNLRWVTQKINVENQMSRGTGYTSDEEVLEVFRNTLNKNSEIFSSIKKLEKLFKNFDEYSSAGIFVKNGPAISTISKDIFGEWNVIRDKWNAEYDDIHLKKKAVVTEKYEDDRRKSFKKIGSFSLEQLQEYADADLSVVEKLKEIIIQKVDEIYKVYGSSEKLFDADFVLEKSLKKNDAVVAIMKDLLDSVKSFENYIKAFFGEGKETNRDESFYGDFVLAYDILLKVDHIYDAIRNYVTQKPYSKDKFKLYFQNPQFMGGWDKDKETDYRATILRYGSKYYLAIMDKKYAKCLQKIDKDDVNGNYEKINYKLLPGPNKMLPKVFFSKKWMAYYNPSEDIQKIYKNGTFKKGDMFNLNDCHKLIDFFKDSISRYPKWSNAYDFNFSETEKYKDIAGFYREVEEQGYKVSFESASKKEVDKLVEEGKLYMFQIYNKDFSDKSHGTPNLHTMYFKLLFDENNHGQIRLSGGAELFMRRASLKKEELVVHPANSPIANKNPDNPKKTTTLSYDVYKDKRFSEDQYELHIPIAINKCPKNIFKINTEVRVLLKHDDNPYVIGIARGERNLLYIVVVDGKGNIVEQYSLNEIINNFNGIRIKTDYHSLLDKKEKERFEARQNWTSIENIKELKAGYISQVVHKICELVEKYDAVIALEDLNSGFKNSRVKVEKQVYQKFEKMLIDKLNYMVDKKSNPCATGGALKGYQITNKFESFKSMSTQNGFIFYIPAWLTSKIDPSTGFVNLLKTKYTSIADSKKFISSFDRIMYVPEEDLFEFALDYKNFSRTDADYIKKWKLYSYGNRIRIFRNPKKNNVFDWEEVCLTSAYKELFNKYGINYQQGDIRALLCEQSDKAFYSSFMALMSLMLQMRNSITGRTDVDFLISPVKNSDGIFYDSRNYEAQENAILPKNADANGAYNIARKVLWAIGQFKKAEDEKLDKVKIAISNKEWLEYAQTSVKH

SEQ ID NO: 116 - protein, 1501 aa, synthetic construct
SKLEKFTNCYSLSKTLRFKAIPVGKTQENIDNKRLLVEDEKRAEDYKGVKKLLDRYYLSFINDVLHSIKLKNLNNYISLFRKKTRTEKENKELENLEINLRKEIAKAFKGNEGYKSLFKKDIIETILPEFLDDKDEIALVNSFNGFTTAFTGFFDNRENMFSEEAKSTSIAFRCINENLTRYISNMDIFEKVDAIFDKHEVQEIKEKILNSDYDVEDFFEGEFFNFVLTQEGIDVYNAIIGGFVTESGEKIKGLNEYINLYNQKTKQKLPKFKPLYKQVLSDRESLSFYGEGSSGWGALGHATVAYVAQHYVSPEAASWAQGILGSSSSSYLASIASWADEYRLTSAGKWSASLHFIDAEDNPPTNCNVDYERDCGSSGCSISAIANYTQRVSDSSLSSENHAEALRFLVHFIGDMTQPLHDEAYAVGGNKINVTFDGYHDNLHSDWDTYMPQKLIGGHALSDAESWAKTLVQNIESGNYTAQAIGWIKGDNISEPITTATRWASDANALVCTVVMPHGAAALQTGDLYPTYYDSVIDTIELQIAKGGYRLANWINEIHGSEIAKGYTSDEEVLEVFRNTLNKNSEIFSSIKKLEKLFKNFDEYSSAGIFVKNGPAISTISKDIFGEWNVIRDKWNAEYDDIHLKKKAVVTEKYEDDRRKSFKKIGSFSLEQLQEYADADLSVVEKLKEIIIQKVDEIYKVYGSSEKLFDADFVLEKSLKKNDAVVAIMKDLLDSVKSFENYIKAFFGEGKETNRDESFYGDFVLAYDILLKVDHIYDAIRNYVTQKPYSKDKFKLYFQNPQFMGGWDKDKETDYRATILRYGSKYYLAIMDKKYAKCLQKIDKDDVNGNYEKINYKLLPGPNKMLPKVFFSKKWMAYYNPSEDIQKIYKNGTFKKGDMFNLNDCHKLIDFFKDSISRYPKWSNAYDFNFSETEKYKDIAGFYREVEEQGYKVSFESASKKEVDKLVEEGKLYMFQIYNKDFSDKSHGTPNLHTMYFKLLFDENNHGQIRLSGGAELFMRRASLKKEELVVHPANSPIANKNPDNPKKTTTLSYDVYKDKRFSEDQYELHIPIAINKCPKNIFKINTEVRVLLKHDDNPYVIGIARGERNLLYIVVVDGKGNIVEQYSLNEIINNFNGIRIKTDYHSLLDKKEKERFEARQNWTSIENIKELKAGYISQVVHKICELVEKYDAVIALEDLNSGFKNSRVKVEKQVYQKFEKMLIDKLNYMVDKKSNPCATGGALKGYQITNKFESFKSMSTQNGFIFYIPAWLTSKIDPSTGFVNLLKTKYTSIADSKKFISSFDRIMYVPEEDLFEFALDYKNFSRTDADYIKKWKLYSYGNRIRIFRNPKKNNVFDWEEVCLTSAYKELFNKYGINYQQGDIRALLCEQSDKAFYSSFMALMSLMLQMRNSITGRTDVDFLISPVKNSDGIFYDSRNYEAQENAILPKNADANGAYNIARKVLWAIGQFKKAEDEKLDKVKIAISNKEWLEYAQTSVKH

SEQ ID NO: 117 - protein, 1498 aa, synthetic construct
SKLEKFTNCYSLSKTLRFKAIPVGKTQENIDNKRLLVEDEKRAEDYKGVKKLLDRYYLSFINDVLHSIKLKNLNNYISLFRKKTRTEKENKELENLEINLRKEIAKAFKGNEGYKSLFKKDIIETILPEFLDDKDEIALVNSFNGFTTAFTGFFDNRENMFSEEAKSTSIAFRCINENLTRYISNMDIFEKVDAIFDKHEVQEIKEKILNSDYDVEDFFEGEFFNFVLTQEGIDVYNAIIGGFVTESGEKIKGLNEYINLYNQKTKQKLPKFKPLYKQVLSDRESLSFYGEGSSGWGNLGHETVAYIAQSFVASSTESFCQNILGDDSTSYLANVATWADTYKYTDAGEFSKPYHFIDAQDNPPQSCGVDYDRDCGSAGCSISAIQNYTNILLESPNGSEALNALKFVVHIIGDIHQPLHDENLEAGGNGIDVTYDGETTNLHHIWDTNMPEEAAGGYSLSVAKTYADLLTERIKTGTYSSKKDSWTDGIDIKDPVSTSMIWAADANTYVCSTVLDDGLAYINSTDLSGEYYDKSQPVFEELIAKAGYRLAAWLDLIASQPSGYTSDEEVLEVFRNTLNKNSEIFSSIKKLEKLFKNFDEYSSAGIFVKNGPAISTISKDIFGEWNVIRDKWNAEYDDIHLKKKAVVTEKYEDDRRKSFKKIGSFSLEQLQEYADADLSVVEKLKEIIIQKVDEIYKVYGSSEKLFDADFVLEKSLKKNDAVVAIMKDLLDSVKSFENYIKAFFGEGKETNRDESFYGDFVLAYDILLKVDHIYDAIRNYVTQKPYSKDKFKLYFQNPQFMGGWDKDKETDYRATILRYGSKYYLAIMDKKYAKCLQKIDKDDVNGNYEKINYKLLPGPNKMLPKVFFSKKWMAYYNPSEDIQKIYKNGTFKKGDMFNLNDCHKLIDFFKDSISRYPKWSNAYDFNFSETEKYKDIAGFYREVEEQGYKVSFESASKKEVDKLVEEGKLYMFQIYNKDFSDKSHGTPNLHTMYFKLLFDENNHGQIRLSGGAELFMRRASLKKEELVVHPANSPIANKNPDNPKKTTTLSYDVYKDKRFSEDQYELHIPIAINKCPKNIFKINTEVRVLLKHDDNPYVIGIARGERNLLYIVVVDGKGNIVEQYSLNEIINNFNGIRIKTDYHSLLDKKEKERFEARQNWTSIENIKELKAGYISQVVHKICELVEKYDAVIALEDLNSGFKNSRVKVEKQVYQKFEKMLIDKLNYMVDKKSNPCATGGALKGYQITNKFESFKSMSTQNGFIFYIPAWLTSKIDPSTGFVNLLKTKYTSIADSKKFISSFDRIMYVPEEDLFEFALDYKNFSRTDADYIKKWKLYSYGNRIRIFRNPKKNNVFDWEEVCLTSAYKELFNKYGINYQQGDIRALLCEQSDKAFYSSFMALMSLMLQMRNSITGRTDVDFLISPVKNSDGIFYDSRNYEAQENAILPKNADANGAYNIARKVLWAIGQFKKAEDEKLDKVKIAISNKEWLEYAQTSVKH

SEQ ID NO: 118 - protein, 1317 aa, synthetic construct
SKLEKFTNCYSLSKTLRFKAIPVGKTQENIDNKRLLVEDEKRAEDYKGVKKLLDRYYLSFINDVLHSIKLKNLNNYISLFRKKTRTEKENKELENLEINLRKEIAKAFKGNEGYKSLFKKDIIETILPEFLDDKDEIALVNSFNGFTTAFTGFFDNRENMFSEEAKSTSIAFRCINENLTRYISNMDIFEKVDAIFDKHEVQEIKEKILNSDYDVEDFFEGEFFNFVLTQEGIDVYNAIIGGFVTESGEKIKGLNEYINLYNQKTKQKLPKFKPLYKQVLSDRESLSFYGEGSSGMELKHSISDYTEAEFLQLVTTICNADTSSEEELVKLVTHFEEMTEHPSGSDLIYYPKEGDDDSPSGIVNTVKQWRAANGKSGFKQGGYTSDEEVLEVFRNTLNKNSEIFSSIKKLEKLFKNFDEYSSAGIFVKNGPAISTISKDIFGEWNVIRDKWNAEYDDIHLKKKAVVTEKYEDDRRKSFKKIGSFSLEQLQEYADADLSVVEKLKEIIIQKVDEIYKVYGSSEKLFDADFVLEKSLKKNDAVVAIMKDLLDSVKSFENYIKAFFGEGKETNRDESFYGDFVLAYDILLKVDHIYDAIRNYVTQKPYSKDKFKLYFQNPQFMGGWDKDKETDYRATILRYGSKYYLAIMDKKYAKCLQKIDKDDVNGNYEKINYKLLPGPNKMLPKVFFSKKWMAYYNPSEDIQKIYKNGTFKKGDMFNLNDCHKLIDFFKDSISRYPKWSNAYDFNFSETEKYKDIAGFYREVEEQGYKVSFESASKKEVDKLVEEGKLYMFQIYNKDFSDKSHGTPNLHTMYFKLLFDENNHGQIRLSGGAELFMRRASLKKEELVVHPANSPIANKNPDNPKKTTTLSYDVYKDKRFSEDQYELHIPIAINKCPKNIFKINTEVRVLLKHDDNPYVIGIARGERNLLYIVVVDGKGNIVEQYSLNEIINNFNGIRIKTDYHSLLDKKEKERFEARQNWTSIENIKELKAGYISQVVHKICELVEKYDAVIALEDLNSGFKNSRVKVEKQVYQKFEKMLIDKLNYMVDKKSNPCATGGALKGYQITNKFESFKSMSTQNGFIFYIPAWLTSKIDPSTGFVNLLKTKYTSIADSKKFISSFDRIMYVPEEDLFEFALDYKNFSRTDADYIKKWKLYSYGNRIRIFRNPKKNNVFDWEEVCLTSAYKELFNKYGINYQQGDIRALLCEQSDKAFYSSFMALMSLMLQMRNSITGRTDVDFLISPVKNSDGIFYDSRNYEAQENAILPKNADANGAYNIARKVLWAIGQFKKAEDEKLDKVKIAISNKEWLEYAQTSVKH

SEQ ID NO: 119 - protein, 1328 aa, synthetic construct
SKLEKFTNCYSLSKTLRFKAIPVGKTQENIDNKRLLVEDEKRAEDYKGVKKLLDRYYLSFINDVLHSIKLKNLNNYISLFRKKTRTEKENKELENLEINLRKEIAKAFKGNEGYKSLFKKDIIETILPEFLDDKDEIALVNSFNGFTTAFTGFFDNRENMFSEEAKSTSIAFRCINENLTRYISNMDIFEKVDAIFDKHEVQEIKEKILNSDYDVEDFFEGEFFNFVLTQEGIDVYNAIIGGFVTESGEKIKGLNEYINLYNQKTKQKLPKFKPLYKQVLSDRESLSFYGEGSSGMLLTGKLYKEEKQKFYDAQNGKCLICQRELNPDVQANHLDHDHELNGPKAGKVRGLLCNLCNAAEGQMKHKFNRSGLKGQGVDYLEWLENLLTYLKSGYTSDEEVLEVFRNTLNKNSEIFSSIKKLEKLFKNFDEYSSAGIFVKNGPAISTISKDIFGEWNVIRDKWNAEYDDIHLKKKAVVTEKYEDDRRKSFKKIGSFSLEQLQEYADADLSVVEKLKEIIIQKVDEIYKVYGSSEKLFDADFVLEKSLKKNDAVVAIMKDLLDSVKSFENYIKAFFGEGKETNRDESFYGDFVLAYDILLKVDHIYDAIRNYVTQKPYSKDKFKLYFQNPQFMGGWDKDKETDYRATILRYGSKYYLAIMDKKYAKCLQKIDKDDVNGNYEKINYKLLPGPNKMLPKVFFSKKWMAYYNPSEDIQKIYKNGTFKKGDMFNLNDCHKLIDFFKDSISRYPKWSNAYDFNFSETEKYKDIAGFYREVEEQGYKVSFESASKKEVDKLVEEGKLYMFQIYNKDFSDKSHGTPNLHTMYFKLLFDENNHGQIRLSGGAELFMRRASLKKEELVVHPANSPIANKNPDNPKKTTTLSYDVYKDKRFSEDQYELHIPIAINKCPKNIFKINTEVRVLLKHDDNPYVIGIARGERNLLYIVVVDGKGNIVEQYSLNEIINNFNGIRIKTDYHSLLDKKEKERFEARQNWTSIENIKELKAGYISQVVHKICELVEKYDAVIALEDLNSGFKNSRVKVEKQVYQKFEKMLIDKLNYMVDKKSNPCATGGALKGYQITNKFESFKSMSTQNGFIFYIPAWLTSKIDPSTGFVNLLKTKYTSIADSKKFISSFDRIMYVPEEDLFEFALDYKNFSRTDADYIKKWKLYSYGNRIRIFRNPKKNNVFDWEEVCLTSAYKELFNKYGINYQQGDIRALLCEQSDKAFYSSFMALMSLMLQMRNSITGRTDVDFLISPVKNSDGIFYDSRNYEAQENAILPKNADANGAYNIARKVLWAIGQFKKAEDEKLDKVKIAISNKEWLEYAQTSVKH

SEQ ID NO: 120 - protein, 1438 aa, synthetic construct
SKLEKFTNCYSLSKTLRFKAIPVGKTQENIDNKRLLVEDEKRAEDYKGVKKLLDRYYLSFINDVLHSIKLKNLNNYISLFRKKTRTEKENKELENLEINLRKEIAKAFKGNEGYKSLFKKDIIETILPEFLDDKDEIALVNSFNGFTTAFTGFFDNRENMFSEEAKSTSIAFRCINENLTRYISNMDIFEKVDAIFDKHEVQEIKEKILNSDYDVEDFFEGEFFNFVLTQEGIDVYNAIIGGFVTESGEKIKGLNEYINLYNQKTKQKLPKFKPLYKQVLSDRESLSFYGEGSSGSFSHAKNEAVKIYRDHPVSFYCGCEIRWQGKKGIPDLESCGYQVRKNENRASRIEWEHVVPAWQFGHQLQCWQQGGRKNCTRTSPEFNQMEADLHNLTPAIGEVNGDRSNFSFSQWNGVDGVTYGQCEMQVNFKERTAMPPERARGAIARTYLYMSEQYGLRLSKAQSQLMQAWNNQYPVSEWECVRDQRIEKVQGNSNRFVREQCPGYTSDEEVLEVFRNTLNKNSEIFSSIKKLEKLFKNFDEYSSAGIFVKNGPAISTISKDIFGEWNVIRDKWNAEYDDIHLKKKAVVTEKYEDDRRKSFKKIGSFSLEQLQEYADADLSVVEKLKEIIIQKVDEIYKVYGSSEKLFDADFVLEKSLKKNDAVVAIMKDLLDSVKSFENYIKAFFGEGKETNRDESFYGDFVLAYDILLKVDHIYDAIRNYVTQKPYSKDKFKLYFQNPQFMGGWDKDKETDYRATILRYGSKYYLAIMDKKYAKCLQKIDKDDVNGNYEKINYKLLPGPNKMLPKVFFSKKWMAYYNPSEDIQKIYKNGTFKKGDMFNLNDCHKLIDFFKDSISRYPKWSNAYDFNFSETEKYKDIAGFYREVEEQGYKVSFESASKKEVDKLVEEGKLYMFQIYNKDFSDKSHGTPNLHTMYFKLLFDENNHGQIRLSGGAELFMRRASLKKEELVVHPANSPIANKNPDNPKKTTTLSYDVYKDKRFSEDQYELHIPIAINKCPKNIFKINTEVRVLLKHDDNPYVIGIARGERNLLYIVVVDGKGNIVEQYSLNEIINNFNGIRIKTDYHSLLDKKEKERFEARQNWTSIENIKELKAGYISQVVHKICELVEKYDAVIALEDLNSGFKNSRVKVEKQVYQKFEKMLIDKLNYMVDKKSNPCATGGALKGYQITNKFESFKSMSTQNGFIFYIPAWLTSKIDPSTGFVNLLKTKYTSIADSKKFISSFDRIMYVPEEDLFEFALDYKNFSRTDADYIKKWKLYSYGNRIRIFRNPKKNNVFDWEEVCLTSAYKELFNKYGINYQQGDIRALLCEQSDKAFYSSFMALMSLMLQMRNSITGRTDVDFLISPVKNSDGIFYDSRNYEAQENAILPKNADANGAYNIARKVLWAIGQFKKAEDEKLDKVKIAISNKEWLEYAQTSVKH

SEQ ID NO: 121 - protein, 1480 aa, synthetic construct
SKLEKFTNCYSLSKTLRFKAIPVGKTQENIDNKRLLVEDEKRAEDYKGVKKLLDRYYLSFINDVLHSIKLKNLNNYISLFRKKTRTEKENKELENLEINLRKEIAKAFKGNEGYKSLFKKDIIETILPEFLDDKDEIALVNSFNGFTTAFTGFFDNRENMFSEEAKSTSIAFRCINENLTRYISNMDIFEKVDAIFDKHEVQEIKEKILNSDYDVEDFFEGEFFNFVLTQEGIDVYNAIIGGFVTESGEKIKGLNEYINLYNQKTKQKLPKFKPLYKQVLSDRESLSFYGEGSSGADLPALPGGPAGGTGELAKYGLPGVAQLRSRESYVLSYDPRTRGALWVLEQLRPERLRGDGDRSACDFREDDSVHAYHRATNADYRGSGFDRGHLAAAANHRWSQRAMDDTFYLSNVAPQVPHLNQNAWNNLERYSRSLTRTYQNVYVCTGPLFLPRTEADGKSYVKYQVIGKNHVAVPTHFFKVLILEAAGGQIELRSYVMPNAPVDETIPLERFLVPIESIERASGLLFVPNILARAGNLKAITAGSGYTSDEEVLEVFRNTLNKNSEIFSSIKKLEKLFKNFDEYSSAGIFVKNGPAISTISKDIFGEWNVIRDKWNAEYDDIHLKKKAVVTEKYEDDRRKSFKKIGSFSLEQLQEYADADLSVVEKLKEIIIQKVDEIYKVYGSSEKLFDADFVLEKSLKKNDAVVAIMKDLLDSVKSFENYIKAFFGEGKETNRDESFYGDFVLAYDILLKVDHIYDAIRNYVTQKPYSKDKFKLYFQNPQFMGGWDKDKETDYRATILRYGSKYYLAIMDKKYAKCLQKIDKDDVNGNYEKINYKLLPGPNKMLPKVFFSKKWMAYYNPSEDIQKIYKNGTFKKGDMFNLNDCHKLIDFFKDSISRYPKWSNAYDFNFSETEKYKDIAGFYREVEEQGYKVSFESASKKEVDKLVEEGKLYMFQIYNKDFSDKSHGTPNLHTMYFKLLFDENNHGQIRLSGGAELFMRRASLKKEELVVHPANSPIANKNPDNPKKTTTLSYDVYKDKRFSEDQYELHIPIAINKCPKNIFKINTEVRVLLKHDDNPYVIGIARGERNLLYIVVVDGKGNIVEQYSLNEIINNFNGIRIKTDYHSLLDKKEKERFEARQNWTSIENIKELKAGYISQVVHKICELVEKYDAVIALEDLNSGFKNSRVKVEKQVYQKFEKMLIDKLNYMVDKKSNPCATGGALKGYQITNKFESFKSMSTQNGFIFYIPAWLTSKIDPSTGFVNLLKTKYTSIADSKKFISSFDRIMYVPEEDLFEFALDYKNFSRTDADYIKKWKLYSYGNRIRIFRNPKKNNVFDWEEVCLTSAYKELFNKYGINYQQGDIRALLCEQSDKAFYSSFMALMSLMLQMRNSITGRTDVDFLISPVKNSDGIFYDSRNYEAQENAILPKNADANGAYNIARKVLWAIGQFKKAEDEKLDKVKIAISNKEWLEYAQTSVKH

SEQ ID NO: 122 - protein, 1382 aa, synthetic construct
SKLEKFTNCYSLSKTLRFKAIPVGKTQENIDNKRLLVEDEKRAEDYKGVKKLLDRYYLSFINDVLHSIKLKNLNNYISLFRKKTRTEKENKELENLEINLRKEIAKAFKGNEGYKSLFKKDIIETILPEFLDDKDEIALVNSFNGFTTAFTGFFDNRENMFSEEAKSTSIAFRCINENLTRYISNMDIFEKVDAIFDKHEVQEIKEKILNSDYDVEDFFEGEFFNFVLTQEGIDVYNAIIGGFVTESGEKIKGLNEYINLYNQKTKQKLPKFKPLYKQVLSDRESLSFYGEGSSGEKNSKDAQKMINEMQKRNRQTNERIEEIIRTTGKENAKYLIEKIKLHDMQEGKCLYSLEAIPLEDLLNNPFNYEVDHIIPRSVSFDNSFNNKVLVKQEENSKKGNRTPFQYLSSSDSKISYETFKKHILNLAKGKGRISKTKKEYLLEERDGYTSDEEVLEVFRNTLNKNSEIFSSIKKLEKLFKNFDEYSSAGIFVKNGPAISTISKDIFGEWNVIRDKWNAEYDDIHLKKKAVVTEKYEDDRRKSFKKIGSFSLEQLQEYADADLSVVEKLKEIIIQKVDEIYKVYGSSEKLFDADFVLEKSLKKNDAVVAIMKDLLDSVKSFENYIKAFFGEGKETNRDESFYGDFVLAYDILLKVDHIYDAIRNYVTQKPYSKDKFKLYFQNPQFMGGWDKDKETDYRATILRYGSKYYLAIMDKKYAKCLQKIDKDDVNGNYEKINYKLLPGPNKMLPKVFFSKKWMAYYNPSEDIQKIYKNGTFKKGDMFNLNDCHKLIDFFKDSISRYPKWSNAYDFNFSETEKYKDIAGFYREVEEQGYKVSFESASKKEVDKLVEEGKLYMFQIYNKDFSDKSHGTPNLHTMYFKLLFDENNHGQIRLSGGAELFMRRASLKKEELVVHPANSPIANKNPDNPKKTTTLSYDVYKDKRFSEDQYELHIPIAINKCPKNIFKINTEVRVLLKHDDNPYVIGIARGERNLLYIVVVDGKGNIVEQYSLNEIINNFNGIRIKTDYHSLLDKKEKERFEARQNWTSIENIKELKAGYISQVVHKICELVEKYDAVIALEDLNSGFKNSRVKVEKQVYQKFEKMLIDKLNYMVDKKSNPCATGGALKGYQITNKFESFKSMSTQNGFIFYIPAWLTSKIDPSTGFVNLLKTKYTSIADSKKFISSFDRIMYVPEEDLFEFALDYKNFSRTDADYIKKWKLYSYGNRIRIFRNPKKNNVFDWEEVCLTSAYKELFNKYGINYQQGDIRALLCEQSDKAFYSSFMALMSLMLQMRNSITGRTDVDFLISPVKNSDGIFYDSRNYEAQENAILPKNADANGAYNIARKVLWAIGQFKKAEDEKLDKVKIAISNKEWLEYAQTSVKH

SEQ ID NO: 123 - protein, 1335 aa, synthetic construct
SKLEKFTNCYSLSKTLRFKAIPVGKTQENIDNKRLLVEDEKRAEDYKGVKKLLDRYYLSFINDVLHSIKLKNLNNYISLFRKKTRTEKENKELENLEINLRKEIAKAFKGNEGYKSLFKKDIIETILPEFLDDKDEIALVNSFNGFTTAFTGFFDNRENMFSEEAKSTSIAFRCINENLTRYISNMDIFEKVDAIFDKHEVQEIKEKILNSDYDVEDFFEGEFFNFVLTQEGIDVYNAIIGGFVTESGEKIKGLNEYINLYNQKTKQKLPKFKPLYKQVLSDRESLSFYGEGSSGDGNAHTVNPSKLVSHRLGDGLTVQQIDRACTPALWCALTREKDFDEKNGLPAREDRAIRVHGHEIKSSDYIQVFSKRKKTDSDRDETPFGAIAVRGGFVEIGPSGYTSDEEVLEVFRNTLNKNSEIFSSIKKLEKLFKNFDEYSSAGIFVKNGPAISTISKDIFGEWNVIRDKWNAEYDDIHLKKKAVVTEKYEDDRRKSFKKIGSFSLEQLQEYADADLSVVEKLKEIIIQKVDEIYKVYGSSEKLFDADFVLEKSLKKNDAVVAIMKDLLDSVKSFENYIKAFFGEGKETNRDESFYGDFVLAYDILLKVDHIYDAIRNYVTQKPYSKDKFKLYFQNPQFMGGWDKDKETDYRATILRYGSKYYLAIMDKKYAKCLQKIDKDDVNGNYEKINYKLLPGPNKMLPKVFFSKKWMAYYNPSEDIQKIYKNGTFKKGDMFNLNDCHKLIDFFKDSISRYPKWSNAYDFNFSETEKYKDIAGFYREVEEQGYKVSFESASKKEVDKLVEEGKLYMFQIYNKDFSDKSHGTPNLHTMYFKLLFDENNHGQIRLSGGAELFMRRASLKKEELVVHPANSPIANKNPDNPKKTTTLSYDVYKDKRFSEDQYELHIPIAINKCPKNIFKINTEVRVLLKHDDNPYVIGIARGERNLLYIVVVDGKGNIVEQYSLNEIINNFNGIRIKTDYHSLLDKKEKERFEARQNWTSIENIKELKAGYISQVVHKICELVEKYDAVIALEDLNSGFKNSRVKVEKQVYQKFEKMLIDKLNYMVDKKSNPCATGGALKGYQITNKFESFKSMSTQNGFIFYIPAWLTSKIDPSTGFVNLLKTKYTSIADSKKFISSFDRIMYVPEEDLFEFALDYKNFSRTDADYIKKWKLYSYGNRIRIFRNPKKNNVFDWEEVCLTSAYKELFNKYGINYQQGDIRALLCEQSDKAFYSSFMALMSLMLQMRNSITGRTDVDFLISPVKNSDGIFYDSRNYEAQENAILPKNADANGAYNIARKVLWAIGQFKKAEDEKLDKVKIAISNKEWLEYAQTSVKH

SEQ ID NO: 124 - protein, 1381 aa, synthetic construct
SKLEKFTNCYSLSKTLRFKAIPVGKTQENIDNKRLLVEDEKRAEDYKGVKKLLDRYYLSFINDVLHSIKLKNLNNYISLFRKKTRTEKENKELENLEINLRKEIAKAFKGNEGYKSLFKKDIIETILPEFLDDKDEIALVNSFNGFTTAFTGFFDNRENMFSEEAKSTSIAFRCINENLTRYISNMDIFEKVDAIFDKHEVQEIKEKILNSDYDVEDFFEGEFFNFVLTQEGIDVYNAIIGGFVTESGEKIKGLNEYINLYNQKTKQKLPKFKPLYKQVLSDRESLSFYGEGSSGENQYTNQGKSNSQQRLKRLEKSLKELGSKILKENIPAKLSKIDNNALQNDRLYLYYLQNGKDMYTGDDLDIDRLSNYDIDHIIPQAFLKDNSIDNKVLVSSASNRGKSDDFPSLEVVKKRKTFWYQLLKSKLISQRKFDNLTKAERGGLLGYTSDEEVLEVFRNTLNKNSEIFSSIKKLEKLFKNFDEYSSAGIFVKNGPAISTISKDIFGEWNVIRDKWNAEYDDIHLKKKAVVTEKYEDDRRKSFKKIGSFSLEQLQEYADADLSVVEKLKEIIIQKVDEIYKVYGSSEKLFDADFVLEKSLKKNDAVVAIMKDLLDSVKSFENYIKAFFGEGKETNRDESFYGDFVLAYDILLKVDHIYDAIRNYVTQKPYSKDKFKLYFQNPQFMGGWDKDKETDYRATILRYGSKYYLAIMDKKYAKCLQKIDKDDVNGNYEKINYKLLPGPNKMLPKVFFSKKWMAYYNPSEDIQKIYKNGTFKKGDMFNLNDCHKLIDFFKDSISRYPKWSNAYDFNFSETEKYKDIAGFYREVEEQGYKVSFESASKKEVDKLVEEGKLYMFQIYNKDFSDKSHGTPNLHTMYFKLLFDENNHGQIRLSGGAELFMRRASLKKEELVVHPANSPIANKNPDNPKKTTTLSYDVYKDKRFSEDQYELHIPIAINKCPKNIFKINTEVRVLLKHDDNPYVIGIARGERNLLYIVVVDGKGNIVEQYSLNEIINNFNGIRIKTDYHSLLDKKEKERFEARQNWTSIENIKELKAGYISQVVHKICELVEKYDAVIALEDLNSGFKNSRVKVEKQVYQKFEKMLIDKLNYMVDKKSNPCATGGALKGYQITNKFESFKSMSTQNGFIFYIPAWLTSKIDPSTGFVNLLKTKYTSIADSKKFISSFDRIMYVPEEDLFEFALDYKNFSRTDADYIKKWKLYSYGNRIRIFRNPKKNNVFDWEEVCLTSAYKELFNKYGINYQQGDIRALLCEQSDKAFYSSFMALMSLMLQMRNSITGRTDVDFLISPVKNSDGIFYDSRNYEAQENAILPKNADANGAYNIARKVLWAIGQFKKAEDEKLDKVKIAISNKEWLEYAQTSVKH

SEQ ID NO: 125 - protein, 1347 aa, synthetic construct
SKLEKFTNCYSLSKTLRFKAIPVGKTQENIDNKRLLVEDEKRAEDYKGVKKLLDRYYLSFINDVLHSIKLKNLNNYISLFRKKTRTEKENKELENLEINLRKEIAKAFKGNEGYKSLFKKDIIETILPEFLDDKDEIALVNSFNGFTTAFTGFFDNRENMFSEEAKSTSIAFRCINENLTRYISNMDIFEKVDAIFDKHEVQEIKEKILNSDYDVEDFFEGEFFNFVLTQEGIDVYNAIIGGFVTESGEKIKGLNEYINLYNQKTKQKLPKFKPLYKQVLSDRESLSFYGEGSSGFPNFVGEPKSKDILKLRLYEQQHGKCLYSGKEINLGRLNEKGYVEIDHALPFSRTWDDSFNNKVLVLGSENQNKGNQTPYEYFNGKDNSREWQEFKARVETSRFPRSKKQRILLQKGYTSDEEVLEVFRNTLNKNSEIFSSIKKLEKLFKNFDEYSSAGIFVKNGPAISTISKDIFGEWNVIRDKWNAEYDDIHLKKKAVVTEKYEDDRRKSFKKIGSFSLEQLQEYADADLSVVEKLKEIIIQKVDEIYKVYGSSEKLFDADFVLEKSLKKNDAVVAIMKDLLDSVKSFENYIKAFFGEGKETNRDESFYGDFVLAYDILLKVDHIYDAIRNYVTQKPYSKDKFKLYFQNPQFMGGWDKDKETDYRATILRYGSKYYLAIMDKKYAKCLQKIDKDDVNGNYEKINYKLLPGPNKMLPKVFFSKKWMAYYNPSEDIQKIYKNGTFKKGDMFNLNDCHKLIDFFKDSISRYPKWSNAYDFNFSETEKYKDIAGFYREVEEQGYKVSFESASKKEVDKLVEEGKLYMFQIYNKDFSDKSHGTPNLHTMYFKLLFDENNHGQIRLSGGAELFMRRASLKKEELVVHPANSPIANKNPDNPKKTTTLSYDVYKDKRFSEDQYELHIPIAINKCPKNIFKINTEVRVLLKHDDNPYVIGIARGERNLLYIVVVDGKGNIVEQYSLNEIINNFNGIRIKTDYHSLLDKKEKERFEARQNWTSIENIKELKAGYISQVVHKICELVEKYDAVIALEDLNSGFKNSRVKVEKQVYQKFEKMLIDKLNYMVDKKSNPCATGGALKGYQITNKFESFKSMSTQNGFIFYIPAWLTSKIDPSTGFVNLLKTKYTSIADSKKFISSFDRIMYVPEEDLFEFALDYKNFSRTDADYIKKWKLYSYGNRIRIFRNPKKNNVFDWEEVCLTSAYKELFNKYGINYQQGDIRALLCEQSDKAFYSSFMALMSLMLQMRNSITGRTDVDFLISPVKNSDGIFYDSRNYEAQENAILPKNADANGAYNIARKVLWAIGQFKKAEDEKLDKVKIAISNKEWLEYAQTSVKH

SEQ ID NO: 126 - protein, 1390 aa, synthetic construct
SKLEKFTNCYSLSKTLRFKAIPVGKTQENIDNKRLLVEDEKRAEDYKGVKKLLDRYYLSFINDVLHSIKLKNLNNYISLFRKKTRTEKENKELENLEINLRKEIAKAFKGNEGYKSLFKKDIIETILPEFLDDKDEIALVNSFNGFTTAFTGFFDNRENMFSEEAKSTSIAFRCINENLTRYISNMDIFEKVDAIFDKHEVQEIKEKILNSDYDVEDFFEGEFFNFVLTQEGIDVYNAIIGGFVTESGEKIKGLNEYINLYNQKTKQKLPKFKPLYKQVLSDRESLSFYGEGSSGSPENIFKDKNNRIKEFAKGISAYSGANLTDGDFDGAKEELDHIIPRSHKKYGTLNDEANLICVTRGDNKNKGNRIFCLRDLADNYKLKQFETTDDLEIEKKIADTIWDANKKDFKFGNYRSFINLTPQEQKAFRHALFLADENPIKQAVIRAINNRNRTGYTSDEEVLEVFRNTLNKNSEIFSSIKKLEKLFKNFDEYSSAGIFVKNGPAISTISKDIFGEWNVIRDKWNAEYDDIHLKKKAVVTEKYEDDRRKSFKKIGSFSLEQLQEYADADLSVVEKLKEIIIQKVDEIYKVYGSSEKLFDADFVLEKSLKKNDAVVAIMKDLLDSVKSFENYIKAFFGEGKETNRDESFYGDFVLAYDILLKVDHIYDAIRNYVTQKPYSKDKFKLYFQNPQFMGGWDKDKETDYRATILRYGSKYYLAIMDKKYAKCLQKIDKDDVNGNYEKINYKLLPGPNKMLPKVFFSKKWMAYYNPSEDIQKIYKNGTFKKGDMFNLNDCHKLIDFFKDSISRYPKWSNAYDFNFSETEKYKDIAGFYREVEEQGYKVSFESASKKEVDKLVEEGKLYMFQIYNKDFSDKSHGTPNLHTMYFKLLFDENNHGQIRLSGGAELFMRRASLKKEELVVHPANSPIANKNPDNPKKTTTLSYDVYKDKRFSEDQYELHIPIAINKCPKNIFKINTEVRVLLKHDDNPYVIGIARGERNLLYIVVVDGKGNIVEQYSLNEIINNFNGIRIKTDYHSLLDKKEKERFEARQNWTSIENIKELKAGYISQVVHKICELVEKYDAVIALEDLNSGFKNSRVKVEKQVYQKFEKMLIDKLNYMVDKKSNPCATGGALKGYQITNKFESFKSMSTQNGFIFYIPAWLTSKIDPSTGFVNLLKTKYTSIADSKKFISSFDRIMYVPEEDLFEFALDYKNFSRTDADYIKKWKLYSYGNRIRIFRNPKKNNVFDWEEVCLTSAYKELFNKYGINYQQGDIRALLCEQSDKAFYSSFMALMSLMLQMRNSITGRTDVDFLISPVKNSDGIFYDSRNYEAQENAILPKNADANGAYNIARKVLWAIGQFKKAEDEKLDKVKIAISNKEWLEYAQTSVKH

SEQ ID NO: 127 - protein, 1337 aa, synthetic construct
SKLEKFTNCYSLSKTLRFKAIPVGKTQENIDNKRLLVEDEKRAEDYKGVKKLLDRYYLSFINDVLHSIKLKNLNNYISLFRKKTRTEKENKELENLEINLRKEIAKAFKGNEGYKSLFKKDIIETILPEFLDDKDEIALVNSFNGFTTAFTGFFDNRENMFSEEAKSTSIAFRCINENLTRYISNMDIFEKVDAIFDKHEVQEIKEKILNSDYDVEDFFEGEFFNFVLTQEGIDVYNAIIGGFVTESGEKIKGLNEYINLYNQKTKQKLPKFKPLYKQVLSDRESLSFYGEGSSGHKHRCQVCGIVIEVDVGPYSQGAHIRPLGRKHGGPDVESNMLCLCPNDHVRFDNGALYITDDLKVVNALNGEVIGPLRVHPRHVIDLDHIRYHRSQLPNIPLEGSSGYTSDEEVLEVFRNTLNKNSEIFSSIKKLEKLFKNFDEYSSAGIFVKNGPAISTISKDIFGEWNVIRDKWNAEYDDIHLKKKAVVTEKYEDDRRKSFKKIGSFSLEQLQEYADADLSVVEKLKEIIIQKVDEIYKVYGSSEKLFDADFVLEKSLKKNDAVVAIMKDLLDSVKSFENYIKAFFGEGKETNRDESFYGDFVLAYDILLKVDHIYDAIRNYVTQKPYSKDKFKLYFQNPQFMGGWDKDKETDYRATILRYGSKYYLAIMDKKYAKCLQKIDKDDVNGNYEKINYKLLPGPNKMLPKVFFSKKWMAYYNPSEDIQKIYKNGTFKKGDMFNLNDCHKLIDFFKDSISRYPKWSNAYDFNFSETEKYKDIAGFYREVEEQGYKVSFESASKKEVDKLVEEGKLYMFQIYNKDFSDKSHGTPNLHTMYFKLLFDENNHGQIRLSGGAELFMRRASLKKEELVVHPANSPIANKNPDNPKKTTTLSYDVYKDKRFSEDQYELHIPIAINKCPKNIFKINTEVRVLLKHDDNPYVIGIARGERNLLYIVVVDGKGNIVEQYSLNEIINNFNGIRIKTDYHSLLDKKEKERFEARQNWTSIENIKELKAGYISQVVHKICELVEKYDAVIALEDLNSGFKNSRVKVEKQVYQKFEKMLIDKLNYMVDKKSNPCATGGALKGYQITNKFESFKSMSTQNGFIFYIPAWLTSKIDPSTGFVNLLKTKYTSIADSKKFISSFDRIMYVPEEDLFEFALDYKNFSRTDADYIKKWKLYSYGNRIRIFRNPKKNNVFDWEEVCLTSAYKELFNKYGINYQQGDIRALLCEQSDKAFYSSFMALMSLMLQMRNSITGRTDVDFLISPVKNSDGIFYDSRNYEAQENAILPKNADANGAYNIARKVLWAIGQFKKAEDEKLDKVKIAISNKEWLEYAQTSVKH

SEQ ID NO: 128 - protein, 1393 aa, synthetic construct
SKLEKFTNCYSLSKTLRFKAIPVGKTQENIDNKRLLVEDEKRAEDYKGVKKLLDRYYLSFINDVLHSIKLKNLNNYISLFRKKTRTEKENKELENLEINLRKEIAKAFKGNEGYKSLFKKDIIETILPEFLDDKDEIALVNSFNGFTTAFTGFFDNRENMFSEEAKSTSIAFRCINENLTRYISNMDIFEKVDAIFDKHEVQEIKEKILNSDYDVEDFFEGEFFNFVLTQEGIDVYNAIIGGFVTESGEKIKGLNEYINLYNQKTKQKLPKFKPLYKQVLSDRESLSFYGEGSSGSEAEEVIFGFADTTEITTTADAIECQISNDASIDETEKHQLVKSRRGQGIFRSRLEQVESRCRVTGVQLKNHLIASHIKPWAVSNNQERLDGHNGLLLAPHVDHLFDKGFISFEDNGEMIVSEKLNLDVLKAWSISQGNYGYFSKQQQEYMCYHRENVFKKLGYTSDEEVLEVFRNTLNKNSEIFSSIKKLEKLFKNFDEYSSAGIFVKNGPAISTISKDIFGEWNVIRDKWNAEYDDIHLKKKAVVTEKYEDDRRKSFKKIGSFSLEQLQEYADADLSVVEKLKEIIIQKVDEIYKVYGSSEKLFDADFVLEKSLKKNDAVVAIMKDLLDSVKSFENYIKAFFGEGKETNRDESFYGDFVLAYDILLKVDHIYDAIRNYVTQKPYSKDKFKLYFQNPQFMGGWDKDKETDYRATILRYGSKYYLAIMDKKYAKCLQKIDKDDVNGNYEKINYKLLPGPNKMLPKVFFSKKWMAYYNPSEDIQKIYKNGTFKKGDMFNLNDCHKLIDFFKDSISRYPKWSNAYDFNFSETEKYKDIAGFYREVEEQGYKVSFESASKKEVDKLVEEGKLYMFQIYNKDFSDKSHGTPNLHTMYFKLLFDENNHGQIRLSGGAELFMRRASLKKEELVVHPANSPIANKNPDNPKKTTTLSYDVYKDKRFSEDQYELHIPIAINKCPKNIFKINTEVRVLLKHDDNPYVIGIARGERNLLYIVVVDGKGNIVEQYSLNEIINNFNGIRIKTDYHSLLDKKEKERFEARQNWTSIENIKELKAGYISQVVHKICELVEKYDAVIALEDLNSGFKNSRVKVEKQVYQKFEKMLIDKLNYMVDKKSNPCATGGALKGYQITNKFESFKSMSTQNGFIFYIPAWLTSKIDPSTGFVNLLKTKYTSIADSKKFISSFDRIMYVPEEDLFEFALDYKNFSRTDADYIKKWKLYSYGNRIRIFRNPKKNNVFDWEEVCLTSAYKELFNKYGINYQQGDIRALLCEQSDKAFYSSFMALMSLMLQMRNSITGRTDVDFLISPVKNSDGIFYDSRNYEAQENAILPKNADANGAYNIARKVLWAIGQFKKAEDEKLDKVKIAISNKEWLEYAQTSVKH

SEQ ID NO: 129 - protein, 1356 aa, synthetic construct
SKLEKFTNCYSLSKTLRFKAIPVGKTQENIDNKRLLVEDEKRAEDYKGVKKLLDRYYLSFINDVLHSIKLKNLNNYISLFRKKTRTEKENKELENLEINLRKEIAKAFKGNEGYKSLFKKDIIETILPEFLDDKDEIALVNSFNGFTTAFTGFFDNRENMFSEEAKSTSIAFRCINENLTRYISNMDIFEKVDAIFDKHEVQEIKEKILNSDYDVEDFFEGEFFNFVLTQEGIDVYNAIIGGFVTESGEKIKGLNEYINLYNQKTKQKLPKFKPLYKQVLSDRESLSFYGEGSSGDEPGVATGNGQPVTGNWLAGASQGDGVPIPSQIADQLRGKEFKSWRDFREQFWVAVANDPELVKYFRKTNAKGMRDGLSPFTPKAEQAGGRDKYEIHHVVQISQGGAVYDIDNLRVMTPKMHIQVGYTSDEEVLEVFRNTLNKNSEIFSSIKKLEKLFKNFDEYSSAGIFVKNGPAISTISKDIFGEWNVIRDKWNAEYDDIHLKKKAVVTEKYEDDRRKSFKKIGSFSLEQLQEYADADLSVVEKLKEIIIQKVDEIYKVYGSSEKLFDADFVLEKSLKKNDAVVAIMKDLLDSVKSFENYIKAFFGEGKETNRDESFYGDFVLAYDILLKVDHIYDAIRNYVTQKPYSKDKFKLYFQNPQFMGGWDKDKETDYRATILRYGSKYYLAIMDKKYAKCLQKIDKDDVNGNYEKINYKLLPGPNKMLPKVFFSKKWMAYYNPSEDIQKIYKNGTFKKGDMFNLNDCHKLIDFFKDSISRYPKWSNAYDFNFSETEKYKDIAGFYREVEEQGYKVSFESASKKEVDKLVEEGKLYMFQIYNKDFSDKSHGTPNLHTMYFKLLFDENNHGQIRLSGGAELFMRRASLKKEELVVHPANSPIANKNPDNPKKTTTLSYDVYKDKRFSEDQYELHIPIAINKCPKNIFKINTEVRVLLKHDDNPYVIGIARGERNLLYIVVVDGKGNIVEQYSLNEIINNFNGIRIKTDYHSLLDKKEKERFEARQNWTSIENIKELKAGYISQVVHKICELVEKYDAVIALEDLNSGFKNSRVKVEKQVYQKFEKMLIDKLNYMVDKKSNPCATGGALKGYQITNKFESFKSMSTQNGFIFYIPAWLTSKIDPSTGFVNLLKTKYTSIADSKKFISSFDRIMYVPEEDLFEFALDYKNFSRTDADYIKKWKLYSYGNRIRIFRNPKKNNVFDWEEVCLTSAYKELFNKYGINYQQGDIRALLCEQSDKAFYSSFMALMSLMLQMRNSITGRTDVDFLISPVKNSDGIFYDSRNYEAQENAILPKNADANGAYNIARKVLWAIGQFKKAEDEKLDKVKIAISNKEWLEYAQTSVKH

SEQ ID NO: 130 - protein, 1395 aa, synthetic construct
MSKLEKFTNCYSLSKTLRFKAIPVGKTQENIDNKRLLVEDEKRAEDYKGVKKLLDRYYLSFINDVLHSIKLKNLNNYISLFRKKTRTEKENKELENLEINLRKEIAKAFKGNEGYKSLFKKDIIETILPEFLDDKDEIALVNSFNGFTTAFTGFFDNRENMFSEEAKSTSIAFRCINENLTRYISNMDIFEKVDAIFDKHEVQEIKEKILNSDYDVEDFFEGEFFNFVLTQEGIDVYNAIIGGFVTESGGSSGSPENIFKDKNNRIKEFAKGISAYSGANLTDGDFDGAKEELDHIIPRSHKKYGTLNDEANLICVTRGDNKNKGNRIFCLRDLADNYKLKQFETTDDLEIEKKIADTIWDANKKDFKFGNYRSFINLTPQEQKAFRHALFLADENPIKQAVIRAINNRNRTGSSGEKIKGLNEYINLYNQKTKQKLPKFKPLYKQVLSDRESLSFYGEGYTSDEEVLEVFRNTLNKNSEIFSSIKKLEKLFKNFDEYSSAGIFVKNGPAISTISKDIFGEWNVIRDKWNAEYDDIHLKKKAVVTEKYEDDRRKSFKKIGSFSLEQLQEYADADLSVVEKLKEIIIQKVDEIYKVYGSSEKLFDADFVLEKSLKKNDAVVAIMKDLLDSVKSFENYIKAFFGEGKETNRDESFYGDFVLAYDILLKVDHIYDAIRNYVTQKPYSKDKFKLYFQNPQFMGGWDKDKETDYRATILRYGSKYYLAIMDKKYAKCLQKIDKDDVNGNYEKINYKLLPGPNKMLPKVFFSKKWMAYYNPSEDIQKIYKNGTFKKGDMFNLNDCHKLIDFFKDSISRYPKWSNAYDFNFSETEKYKDIAGFYREVEEQGYKVSFESASKKEVDKLVEEGKLYMFQIYNKDFSDKSHGTPNLHTMYFKLLFDENNHGQIRLSGGAELFMRRASLKKEELVVHPANSPIANKNPDNPKKTTTLSYDVYKDKRFSEDQYELHIPIAINKCPKNIFKINTEVRVLLKHDDNPYVIGIARGERNLLYIVVVDGKGNIVEQYSLNEIINNFNGIRIKTDYHSLLDKKEKERFEARQNWTSIENIKELKAGYISQVVHKICELVEKYDAVIALEDLNSGFKNSRVKVEKQVYQKFEKMLIDKLNYMVDKKSNPCATGGALKGYQITNKFESFKSMSTQNGFIFYIPAWLTSKIDPSTGFVNLLKTKYTSIADSKKFISSFDRIMYVPEEDLFEFALDYKNFSRTDADYIKKWKLYSYGNRIRIFRNPKKNNVFDWEEVCLTSAYKELFNKYGINYQQGDIRALLCEQSDKAFYSSFMALMSLMLQMRNSITGRTDVDFLISPVKNSDGIFYDSRNYEAQENAILPKNADANGAYNIARKVLWAIGQFKKAEDEKLDKVKIAISNKEWLEYAQTSVKH

SEQ ID NO: 131 - protein, 1361 aa, synthetic construct
MSKLEKFTNCYSLSKTLRFKAIPVGKTQENIDNKRLLVEDEKRAEDYKGVKKLLDRYYLSFINDVLHSIKLKNLNNYISLFRKKTRTEKENKELENLEINLRKEIAKAFKGNEGYKSLFKKDIIETILPEFLDDKDEIALVNSFNGFTTAFTGFFDNRENMFSEEAKSTSIAFRCINENLTRYISNMDIFEKVDAIFDKHEVQEIKEKILNSDYDVEDFFEGEFFNFVLTQEGIDVYNAIIGGFVTESGGSSGDEPGVATGNGQPVTGNWLAGASQGDGVPIPSQIADQLRGKEFKSWRDFREQFWVAVANDPELVKYFRKTNAKGMRDGLSPFTPKAEQAGGRDKYEIHHVVQISQGGAVYDIDNLRVMTPKMHIQVGSSGEKIKGLNEYINLYNQKTKQKLPKFKPLYKQVLSDRESLSFYGEGYTSDEEVLEVFRNTLNKNSEIFSSIKKLEKLFKNFDEYSSAGIFVKNGPAISTISKDIFGEWNVIRDKWNAEYDDIHLKKKAVVTEKYEDDRRKSFKKIGSFSLEQLQEYADADLSVVEKLKEIIIQKVDEIYKVYGSSEKLFDADFVLEKSLKKNDAVVAIMKDLLDSVKSFENYIKAFFGEGKETNRDESFYGDFVLAYDILLKVDHIYDAIRNYVTQKPYSKDKFKLYFQNPQFMGGWDKDKETDYRATILRYGSKYYLAIMDKKYAKCLQKIDKDDVNGNYEKINYKLLPGPNKMLPKVFFSKKWMAYYNPSEDIQKIYKNGTFKKGDMFNLNDCHKLIDFFKDSISRYPKWSNAYDFNFSETEKYKDIAGFYREVEEQGYKVSFESASKKEVDKLVEEGKLYMFQIYNKDFSDKSHGTPNLHTMYFKLLFDENNHGQIRLSGGAELFMRRASLKKEELVVHPANSPIANKNPDNPKKTTTLSYDVYKDKRFSEDQYELHIPIAINKCPKNIFKINTEVRVLLKHDDNPYVIGIARGERNLLYIVVVDGKGNIVEQYSLNEIINNFNGIRIKTDYHSLLDKKEKERFEARQNWTSIENIKELKAGYISQVVHKICELVEKYDAVIALEDLNSGFKNSRVKVEKQVYQKFEKMLIDKLNYMVDKKSNPCATGGALKGYQITNKFESFKSMSTQNGFIFYIPAWLTSKIDPSTGFVNLLKTKYTSIADSKKFISSFDRIMYVPEEDLFEFALDYKNFSRTDADYIKKWKLYSYGNRIRIFRNPKKNNVFDWEEVCLTSAYKELFNKYGINYQQGDIRALLCEQSDKAFYSSFMALMSLMLQMRNSITGRTDVDFLISPVKNSDGIFYDSRNYEAQENAILPKNADANGAYNIARKVLWAIGQFKKAEDEKLDKVKIAISNKEWLEYAQTSVKH

SEQ ID NO: 132 - protein, 1342 aa, synthetic construct
MSKLEKFTNCYSLSKTLRFKAIPVGKTQENIDNKRLLVEDEKRAEDYKGVKKLLDRYYLSFINDVLHSIKLKNLNNYISLFRKKTRTEKENKELENLEINLRKEIAKAFKGNEGYKSLFKKDIIETILPEFLDDKDEIALVNSFNGFTTAFTGFFDNRENMFSEEAKSTSIAFRCINENLTRYISNMDIFEKVDAIFDKHEVQEIKEKILNSDYDVEDFFEGEFFNFVLTQEGIDVYNAIIGGFVTESGGSSGHKHRCQVCGIVIEVDVGPYSQGAHIRPLGRKHGGPDVESNMLCLCPNDHVRFDNGALYITDDLKVVNALNGEVIGPLRVHPRHVIDLDHIRYHRSQLPNIPLEGSSGSSGEKIKGLNEYINLYNQKTKQKLPKFKPLYKQVLSDRESLSFYGEGYTSDEEVLEVFRNTLNKNSEIFSSIKKLEKLFKNFDEYSSAGIFVKNGPAISTISKDIFGEWNVIRDKWNAEYDDIHLKKKAVVTEKYEDDRRKSFKKIGSFSLEQLQEYADADLSVVEKLKEIIIQKVDEIYKVYGSSEKLFDADFVLEKSLKKNDAVVAIMKDLLDSVKSFENYIKAFFGEGKETNRDESFYGDFVLAYDILLKVDHIYDAIRNYVTQKPYSKDKFKLYFQNPQFMGGWDKDKETDYRATILRYGSKYYLAIMDKKYAKCLQKIDKDDVNGNYEKINYKLLPGPNKMLPKVFFSKKWMAYYNPSEDIQKIYKNGTFKKGDMFNLNDCHKLIDFFKDSISRYPKWSNAYDFNFSETEKYKDIAGFYREVEEQGYKVSFESASKKEVDKLVEEGKLYMFQIYNKDFSDKSHGTPNLHTMYFKLLFDENNHGQIRLSGGAELFMRRASLKKEELVVHPANSPIANKNPDNPKKTTTLSYDVYKDKRFSEDQYELHIPIAINKCPKNIFKINTEVRVLLKHDDNPYVIGIARGERNLLYIVVVDGKGNIVEQYSLNEIINNFNGIRIKTDYHSLLDKKEKERFEARQNWTSIENIKELKAGYISQVVHKICELVEKYDAVIALEDLNSGFKNSRVKVEKQVYQKFEKMLIDKLNYMVDKKSNPCATGGALKGYQITNKFESFKSMSTQNGFIFYIPAWLTSKIDPSTGFVNLLKTKYTSIADSKKFISSFDRIMYVPEEDLFEFALDYKNFSRTDADYIKKWKLYSYGNRIRIFRNPKKNNVFDWEEVCLTSAYKELFNKYGINYQQGDIRALLCEQSDKAFYSSFMALMSLMLQMRNSITGRTDVDFLISPVKNSDGIFYDSRNYEAQENAILPKNADANGAYNIARKVLWAIGQFKKAEDEKLDKVKIAISNKEWLEYAQTSVKH

SEQ ID NO: 133 - protein, 1398 aa, synthetic construct
MSKLEKFTNCYSLSKTLRFKAIPVGKTQENIDNKRLLVEDEKRAEDYKGVKKLLDRYYLSFINDVLHSIKLKNLNNYISLFRKKTRTEKENKELENLEINLRKEIAKAFKGNEGYKSLFKKDIIETILPEFLDDKDEIALVNSFNGFTTAFTGFFDNRENMFSEEAKSTSIAFRCINENLTRYISNMDIFEKVDAIFDKHEVQEIKEKILNSDYDVEDFFEGEFFNFVLTQEGIDVYNAIIGGFVTESGGSSGSEAEEVIFGFADTTEITTTADAIECQISNDASIDETEKHQLVKSRRGQGIFRSRLEQVESRCRVTGVQLKNHLIASHIKPWAVSNNQERLDGHNGLLLAPHVDHLFDKGFISFEDNGEMIVSEKLNLDVLKAWSISQGNYGYFSKQQQEYMCYHRENVFKKLGSSGEKIKGLNEYINLYNQKTKQKLPKFKPLYKQVLSDRESLSFYGEGYTSDEEVLEVFRNTLNKNSEIFSSIKKLEKLFKNFDEYSSAGIFVKNGPAISTISKDIFGEWNVIRDKWNAEYDDIHLKKKAVVTEKYEDDRRKSFKKIGSFSLEQLQEYADADLSVVEKLKEIIIQKVDEIYKVYGSSEKLFDADFVLEKSLKKNDAVVAIMKDLLDSVKSFENYIKAFFGEGKETNRDESFYGDFVLAYDILLKVDHIYDAIRNYVTQKPYSKDKFKLYFQNPQFMGGWDKDKETDYRATILRYGSKYYLAIMDKKYAKCLQKIDKDDVNGNYEKINYKLLPGPNKMLPKVFFSKKWMAYYNPSEDIQKIYKNGTFKKGDMFNLNDCHKLIDFFKDSISRYPKWSNAYDFNFSETEKYKDIAGFYREVEEQGYKVSFESASKKEVDKLVEEGKLYMFQIYNKDFSDKSHGTPNLHTMYFKLLFDENNHGQIRLSGGAELFMRRASLKKEELVVHPANSPIANKNPDNPKKTTTLSYDVYKDKRFSEDQYELHIPIAINKCPKNIFKINTEVRVLLKHDDNPYVIGIARGERNLLYIVVVDGKGNIVEQYSLNEIINNFNGIRIKTDYHSLLDKKEKERFEARQNWTSIENIKELKAGYISQVVHKICELVEKYDAVIALEDLNSGFKNSRVKVEKQVYQKFEKMLIDKLNYMVDKKSNPCATGGALKGYQITNKFESFKSMSTQNGFIFYIPAWLTSKIDPSTGFVNLLKTKYTSIADSKKFISSFDRIMYVPEEDLFEFALDYKNFSRTDADYIKKWKLYSYGNRIRIFRNPKKNNVFDWEEVCLTSAYKELFNKYGINYQQGDIRALLCEQSDKAFYSSFMALMSLMLQMRNSITGRTDVDFLISPVKNSDGIFYDSRNYEAQENAILPKNADANGAYNIARKVLWAIGQFKKAEDEKLDKVKIAISNKEWLEYAQTSVKH

SEQ ID NO: 134 - protein, 1352 aa, synthetic construct
MSKLEKFTNCYSLSKTLRFKAIPVGKTQENIDNKRLLVEDEKRAEDYKGVKKLLDRYYLSFINDVLHSIKLKNLNNYISLFRKKTRTEKENKELENLEINLRKEIAKAFKGNEGYKSLFKKDIIETILPEFLDDKDEIALVNSFNGFTTAFTGFFDNRENMFSEEAKSTSIAFRCINENLTRYISNMDIFEKVDAIFDKHEVQEIKEKILNSDYDVEDFFEGEFFNFVLTQEGIDVYNAIIGGFVTESGGSSGFPNFVGEPKSKDILKLRLYEQQHGKCLYSGKEINLGRLNEKGYVEIDHALPFSRTWDDSFNNKVLVLGSENQNKGNQTPYEYFNGKDNSREWQEFKARVETSRFPRSKKQRILLQKGSSGEKIKGLNEYINLYNQKTKQKLPKFKPLYKQVLSDRESLSFYGEGYTSDEEVLEVFRNTLNKNSEIFSSIKKLEKLFKNFDEYSSAGIFVKNGPAISTISKDIFGEWNVIRDKWNAEYDDIHLKKKAVVTEKYEDDRRKSFKKIGSFSLEQLQEYADADLSVVEKLKEIIIQKVDEIYKVYGSSEKLFDADFVLEKSLKKNDAVVAIMKDLLDSVKSFENYIKAFFGEGKETNRDESFYGDFVLAYDILLKVDHIYDAIRNYVTQKPYSKDKFKLYFQNPQFMGGWDKDKETDYRATILRYGSKYYLAIMDKKYAKCLQKIDKDDVNGNYEKINYKLLPGPNKMLPKVFFSKKWMAYYNPSEDIQKIYKNGTFKKGDMFNLNDCHKLIDFFKDSISRYPKWSNAYDFNFSETEKYKDIAGFYREVEEQGYKVSFESASKKEVDKLVEEGKLYMFQIYNKDFSDKSHGTPNLHTMYFKLLFDENNHGQIRLSGGAELFMRRASLKKEELVVHPANSPIANKNPDNPKKTTTLSYDVYKDKRFSEDQYELHIPIAINKCPKNIFKINTEVRVLLKHDDNPYVIGIARGERNLLYIVVVDGKGNIVEQYSLNEIINNFNGIRIKTDYHSLLDKKEKERFEARQNWTSIENIKELKAGYISQVVHKICELVEKYDAVIALEDLNSGFKNSRVKVEKQVYQKFEKMLIDKLNYMVDKKSNPCATGGALKGYQITNKFESFKSMSTQNGFIFYIPAWLTSKIDPSTGFVNLLKTKYTSIADSKKFISSFDRIMYVPEEDLFEFALDYKNFSRTDADYIKKWKLYSYGNRIRIFRNPKKNNVFDWEEVCLTSAYKELFNKYGINYQQGDIRALLCEQSDKAFYSSFMALMSLMLQMRNSITGRTDVDFLISPVKNSDGIFYDSRNYEAQENAILPKNADANGAYNIARKVLWAIGQFKKAEDEKLDKVKIAISNKEWLEYAQTSVKH

SEQ ID NO: 135 - protein, 1386 aa, synthetic construct
MSKLEKFTNCYSLSKTLRFKAIPVGKTQENIDNKRLLVEDEKRAEDYKGVKKLLDRYYLSFINDVLHSIKLKNLNNYISLFRKKTRTEKENKELENLEINLRKEIAKAFKGNEGYKSLFKKDIIETILPEFLDDKDEIALVNSFNGFTTAFTGFFDNRENMFSEEAKSTSIAFRCINENLTRYISNMDIFEKVDAIFDKHEVQEIKEKILNSDYDVEDFFEGEFFNFVLTQEGIDVYNAIIGGFVTESGGSSGENQYTNQGKSNSQQRLKRLEKSLKELGSKILKENIPAKLSKIDNNALQNDRLYLYYLQNGKDMYTGDDLDIDRLSNYDIDHIIPQAFLKDNSIDNKVLVSSASNRGKSDDFPSLEVVKKRKTFWYQLLKSKLISQRKFDNLTKAERGGLLGSSGEKIKGLNEYINLYNQKTKQKLPKFKPLYKQVLSDRESLSFYGEGYTSDEEVLEVFRNTLNKNSEIFSSIKKLEKLFKNFDEYSSAGIFVKNGPAISTISKDIFGEWNVIRDKWNAEYDDIHLKKKAVVTEKYEDDRRKSFKKIGSFSLEQLQEYADADLSVVEKLKEIIIQKVDEIYKVYGSSEKLFDADFVLEKSLKKNDAVVAIMKDLLDSVKSFENYIKAFFGEGKETNRDESFYGDFVLAYDILLKVDHIYDAIRNYVTQKPYSKDKFKLYFQNPQFMGGWDKDKETDYRATILRYGSKYYLAIMDKKYAKCLQKIDKDDVNGNYEKINYKLLPGPNKMLPKVFFSKKWMAYYNPSEDIQKIYKNGTFKKGDMFNLNDCHKLIDFFKDSISRYPKWSNAYDFNFSETEKYKDIAGFYREVEEQGYKVSFESASKKEVDKLVEEGKLYMFQIYNKDFSDKSHGTPNLHTMYFKLLFDENNHGQIRLSGGAELFMRRASLKKEELVVHPANSPIANKNPDNPKKTTTLSYDVYKDKRFSEDQYELHIPIAINKCPKNIFKINTEVRVLLKHDDNPYVIGIARGERNLLYIVVVDGKGNIVEQYSLNEIINNFNGIRIKTDYHSLLDKKEKERFEARQNWTSIENIKELKAGYISQVVHKICELVEKYDAVIALEDLNSGFKNSRVKVEKQVYQKFEKMLIDKLNYMVDKKSNPCATGGALKGYQITNKFESFKSMSTQNGFIFYIPAWLTSKIDPSTGFVNLLKTKYTSIADSKKFISSFDRIMYVPEEDLFEFALDYKNFSRTDADYIKKWKLYSYGNRIRIFRNPKKNNVFDWEEVCLTSAYKELFNKYGINYQQGDIRALLCEQSDKAFYSSFMALMSLMLQMRNSITGRTDVDFLISPVKNSDGIFYDSRNYEAQENAILPKNADANGAYNIARKVLWAIGQFKKAEDEKLDKVKIAISNKEWLEYAQTSVKH

SEQ ID NO: 136 - protein, 1340 aa, synthetic construct
MSKLEKFTNCYSLSKTLRFKAIPVGKTQENIDNKRLLVEDEKRAEDYKGVKKLLDRYYLSFINDVLHSIKLKNLNNYISLFRKKTRTEKENKELENLEINLRKEIAKAFKGNEGYKSLFKKDIIETILPEFLDDKDEIALVNSFNGFTTAFTGFFDNRENMFSEEAKSTSIAFRCINENLTRYISNMDIFEKVDAIFDKHEVQEIKEKILNSDYDVEDFFEGEFFNFVLTQEGIDVYNAIIGGFVTESGGSSGDGNAHTVNPSKLVSHRLGDGLTVQQIDRACTPALWCALTREKDFDEKNGLPAREDRAIRVHGHEIKSSDYIQVFSKRKKTDSDRDETPFGAIAVRGGFVEIGPSGSSGEKIKGLNEYINLYNQKTKQKLPKFKPLYKQVLSDRESLSFYGEGYTSDEEVLEVFRNTLNKNSEIFSSIKKLEKLFKNFDEYSSAGIFVKNGPAISTISKDIFGEWNVIRDKWNAEYDDIHLKKKAVVTEKYEDDRRKSFKKIGSFSLEQLQEYADADLSVVEKLKEIIIQKVDEIYKVYGSSEKLFDADFVLEKSLKKNDAVVAIMKDLLDSVKSFENYIKAFFGEGKETNRDESFYGDFVLAYDILLKVDHIYDAIRNYVTQKPYSKDKFKLYFQNPQFMGGWDKDKETDYRATILRYGSKYYLAIMDKKYAKCLQKIDKDDVNGNYEKINYKLLPGPNKMLPKVFFSKKWMAYYNPSEDIQKIYKNGTFKKGDMFNLNDCHKLIDFFKDSISRYPKWSNAYDFNFSETEKYKDIAGFYREVEEQGYKVSFESASKKEVDKLVEEGKLYMFQIYNKDFSDKSHGTPNLHTMYFKLLFDENNHGQIRLSGGAELFMRRASLKKEELVVHPANSPIANKNPDNPKKTTTLSYDVYKDKRFSEDQYELHIPIAINKCPKNIFKINTEVRVLLKHDDNPYVIGIARGERNLLYIVVVDGKGNIVEQYSLNEIINNFNGIRIKTDYHSLLDKKEKERFEARQNWTSIENIKELKAGYISQVVHKICELVEKYDAVIALEDLNSGFKNSRVKVEKQVYQKFEKMLIDKLNYMVDKKSNPCATGGALKGYQITNKFESFKSMSTQNGFIFYIPAWLTSKIDPSTGFVNLLKTKYTSIADSKKFISSFDRIMYVPEEDLFEFALDYKNFSRTDADYIKKWKLYSYGNRIRIFRNPKKNNVFDWEEVCLTSAYKELFNKYGINYQQGDIRALLCEQSDKAFYSSFMALMSLMLQMRNSITGRTDVDFLISPVKNSDGIFYDSRNYEAQENAILPKNADANGAYNIARKVLWAIGQFKKAEDEKLDKVKIAISNKEWLEYAQTSVKH

SEQ ID NO: 137 - protein, 1387 aa, synthetic construct
MSKLEKFTNCYSLSKTLRFKAIPVGKTQENIDNKRLLVEDEKRAEDYKGVKKLLDRYYLSFINDVLHSIKLKNLNNYISLFRKKTRTEKENKELENLEINLRKEIAKAFKGNEGYKSLFKKDIIETILPEFLDDKDEIALVNSFNGFTTAFTGFFDNRENMFSEEAKSTSIAFRCINENLTRYISNMDIFEKVDAIFDKHEVQEIKEKILNSDYDVEDFFEGEFFNFVLTQEGIDVYNAIIGGFVTESGGSSGEKNSKDAQKMINEMQKRNRQTNERIEEIIRTTGKENAKYLIEKIKLHDMQEGKCLYSLEAIPLEDLLNNPFNYEVDHIIPRSVSFDNSFNNKVLVKQEENSKKGNRTPFQYLSSSDSKISYETFKKHILNLAKGKGRISKTKKEYLLEERDGSSGEKIKGLNEYINLYNQKTKQKLPKFKPLYKQVLSDRESLSFYGEGYTSDEEVLEVFRNTLNKNSEIFSSIKKLEKLFKNFDEYSSAGIFVKNGPAISTISKDIFGEWNVIRDKWNAEYDDIHLKKKAVVTEKYEDDRRKSFKKIGSFSLEQLQEYADADLSVVEKLKEIIIQKVDEIYKVYGSSEKLFDADFVLEKSLKKNDAVVAIMKDLLDSVKSFENYIKAFFGEGKETNRDESFYGDFVLAYDILLKVDHIYDAIRNYVTQKPYSKDKFKLYFQNPQFMGGWDKDKETDYRATILRYGSKYYLAIMDKKYAKCLQKIDKDDVNGNYEKINYKLLPGPNKMLPKVFFSKKWMAYYNPSEDIQKIYKNGTFKKGDMFNLNDCHKLIDFFKDSISRYPKWSNAYDFNFSETEKYKDIAGFYREVEEQGYKVSFESASKKEVDKLVEEGKLYMFQIYNKDFSDKSHGTPNLHTMYFKLLFDENNHGQIRLSGGAELFMRRASLKKEELVVHPANSPIANKNPDNPKKTTTLSYDVYKDKRFSEDQYELHIPIAINKCPKNIFKINTEVRVLLKHDDNPYVIGIARGERNLLYIVVVDGKGNIVEQYSLNEIINNFNGIRIKTDYHSLLDKKEKERFEARQNWTSIENIKELKAGYISQVVHKICELVEKYDAVIALEDLNSGFKNSRVKVEKQVYQKFEKMLIDKLNYMVDKKSNPCATGGALKGYQITNKFESFKSMSTQNGFIFYIPAWLTSKIDPSTGFVNLLKTKYTSIADSKKFISSFDRIMYVPEEDLFEFALDYKNFSRTDADYIKKWKLYSYGNRIRIFRNPKKNNVFDWEEVCLTSAYKELFNKYGINYQQGDIRALLCEQSDKAFYSSFMALMSLMLQMRNSITGRTDVDFLISPVKNSDGIFYDSRNYEAQENAILPKNADANGAYNIARKVLWAIGQFKKAEDEKLDKVKIAISNKEWLEYAQTSVKH

SEQ ID NO: 138 - protein, 1485 aa, synthetic construct
MSKLEKFTNCYSLSKTLRFKAIPVGKTQENIDNKRLLVEDEKRAEDYKGVKKLLDRYYLSFINDVLHSIKLKNLNNYISLFRKKTRTEKENKELENLEINLRKEIAKAFKGNEGYKSLFKKDIIETILPEFLDDKDEIALVNSFNGFTTAFTGFFDNRENMFSEEAKSTSIAFRCINENLTRYISNMDIFEKVDAIFDKHEVQEIKEKILNSDYDVEDFFEGEFFNFVLTQEGIDVYNAIIGGFVTESGGSSGADLPALPGGPAGGTGELAKYGLPGVAQLRSRESYVLSYDPRTRGALWVLEQLRPERLRGDGDRSACDFREDDSVHAYHRATNADYRGSGFDRGHLAAAANHRWSQRAMDDTFYLSNVAPQVPHLNQNAWNNLERYSRSLTRTYQNVYVCTGPLFLPRTEADGKSYVKYQVIGKNHVAVPTHFFKVLILEAAGGQIELRSYVMPNAPVDETIPLERFLVPIESIERASGLLFVPNILARAGNLKAITAGSGSSGEKIKGLNEYINLYNQKTKQKLPKFKPLYKQVLSDRESLSFYGEGYTSDEEVLEVFRNTLNKNSEIFSSIKKLEKLFKNFDEYSSAGIFVKNGPAISTISKDIFGEWNVIRDKWNAEYDDIHLKKKAVVTEKYEDDRRKSFKKIGSFSLEQLQEYADADLSVVEKLKEIIIQKVDEIYKVYGSSEKLFDADFVLEKSLKKNDAVVAIMKDLLDSVKSFENYIKAFFGEGKETNRDESFYGDFVLAYDILLKVDHIYDAIRNYVTQKPYSKDKFKLYFQNPQFMGGWDKDKETDYRATILRYGSKYYLAIMDKKYAKCLQKIDKDDVNGNYEKINYKLLPGPNKMLPKVFFSKKWMAYYNPSEDIQKIYKNGTFKKGDMFNLNDCHKLIDFFKDSISRYPKWSNAYDFNFSETEKYKDIAGFYREVEEQGYKVSFESASKKEVDKLVEEGKLYMFQIYNKDFSDKSHGTPNLHTMYFKLLFDENNHGQIRLSGGAELFMRRASLKKEELVVHPANSPIANKNPDNPKKTTTLSYDVYKDKRFSEDQYELHIPIAINKCPKNIFKINTEVRVLLKHDDNPYVIGIARGERNLLYIVVVDGKGNIVEQYSLNEIINNFNGIRIKTDYHSLLDKKEKERFEARQNWTSIENIKELKAGYISQVVHKICELVEKYDAVIALEDLNSGFKNSRVKVEKQVYQKFEKMLIDKLNYMVDKKSNPCATGGALKGYQITNKFESFKSMSTQNGFIFYIPAWLTSKIDPSTGFVNLLKTKYTSIADSKKFISSFDRIMYVPEEDLFEFALDYKNFSRTDADYIKKWKLYSYGNRIRIFRNPKKNNVFDWEEVCLTSAYKELFNKYGINYQQGDIRALLCEQSDKAFYSSFMALMSLMLQMRNSITGRTDVDFLISPVKNSDGIFYDSRNYEAQENAILPKNADANGAYNIARKVLWAIGQFKKAEDEKLDKVKIAISNKEWLEYAQTSVKH

SEQ ID NO: 139 - protein, 1443 aa, synthetic construct
MSKLEKFTNCYSLSKTLRFKAIPVGKTQENIDNKRLLVEDEKRAEDYKGVKKLLDRYYLSFINDVLHSIKLKNLNNYISLFRKKTRTEKENKELENLEINLRKEIAKAFKGNEGYKSLFKKDIIETILPEFLDDKDEIALVNSFNGFTTAFTGFFDNRENMFSEEAKSTSIAFRCINENLTRYISNMDIFEKVDAIFDKHEVQEIKEKILNSDYDVEDFFEGEFFNFVLTQEGIDVYNAIIGGFVTESGGSSGSFSHAKNEAVKIYRDHPVSFYCGCEIRWQGKKGIPDLESCGYQVRKNENRASRIEWEHVVPAWQFGHQLQCWQQGGRKNCTRTSPEFNQMEADLHNLTPAIGEVNGDRSNFSFSQWNGVDGVTYGQCEMQVNFKERTAMPPERARGAIARTYLYMSEQYGLRLSKAQSQLMQAWNNQYPVSEWECVRDQRIEKVQGNSNRFVREQCPGSSGEKIKGLNEYINLYNQKTKQKLPKFKPLYKQVLSDRESLSFYGEGYTSDEEVLEVFRNTLNKNSEIFSSIKKLEKLFKNFDEYSSAGIFVKNGPAISTISKDIFGEWNVIRDKWNAEYDDIHLKKKAVVTEKYEDDRRKSFKKIGSFSLEQLQEYADADLSVVEKLKEIIIQKVDEIYKVYGSSEKLFDADFVLEKSLKKNDAVVAIMKDLLDSVKSFENYIKAFFGEGKETNRDESFYGDFVLAYDILLKVDHIYDAIRNYVTQKPYSKDKFKLYFQNPQFMGGWDKDKETDYRATILRYGSKYYLAIMDKKYAKCLQKIDKDDVNGNYEKINYKLLPGPNKMLPKVFFSKKWMAYYNPSEDIQKIYKNGTFKKGDMFNLNDCHKLIDFFKDSISRYPKWSNAYDFNFSETEKYKDIAGFYREVEEQGYKVSFESASKKEVDKLVEEGKLYMFQIYNKDFSDKSHGTPNLHTMYFKLLFDENNHGQIRLSGGAELFMRRASLKKEELVVHPANSPIANKNPDNPKKTTTLSYDVYKDKRFSEDQYELHIPIAINKCPKNIFKINTEVRVLLKHDDNPYVIGIARGERNLLYIVVVDGKGNIVEQYSLNEIINNFNGIRIKTDYHSLLDKKEKERFEARQNWTSIENIKELKAGYISQVVHKICELVEKYDAVIALEDLNSGFKNSRVKVEKQVYQKFEKMLIDKLNYMVDKKSNPCATGGALKGYQITNKFESFKSMSTQNGFIFYIPAWLTSKIDPSTGFVNLLKTKYTSIADSKKFISSFDRIMYVPEEDLFEFALDYKNFSRTDADYIKKWKLYSYGNRIRIFRNPKKNNVFDWEEVCLTSAYKELFNKYGINYQQGDIRALLCEQSDKAFYSSFMALMSLMLQMRNSITGRTDVDFLISPVKNSDGIFYDSRNYEAQENAILPKNADANGAYNIARKVLWAIGQFKKAEDEKLDKVKIAISNKEWLEYAQTSVKH

SEQ ID NO: 140 - protein, 1333 aa, synthetic construct
MSKLEKFTNCYSLSKTLRFKAIPVGKTQENIDNKRLLVEDEKRAEDYKGVKKLLDRYYLSFINDVLHSIKLKNLNNYISLFRKKTRTEKENKELENLEINLRKEIAKAFKGNEGYKSLFKKDIIETILPEFLDDKDEIALVNSFNGFTTAFTGFFDNRENMFSEEAKSTSIAFRCINENLTRYISNMDIFEKVDAIFDKHEVQEIKEKILNSDYDVEDFFEGEFFNFVLTQEGIDVYNAIIGGFVTESGGSSGMLLTGKLYKEEKQKFYDAQNGKCLICQRELNPDVQANHLDHDHELNGPKAGKVRGLLCNLCNAAEGQMKHKFNRSGLKGQGVDYLEWLENLLTYLKSGSSGEKIKGLNEYINLYNQKTKQKLPKFKPLYKQVLSDRESLSFYGEGYTSDEEVLEVFRNTLNKNSEIFSSIKKLEKLFKNFDEYSSAGIFVKNGPAISTISKDIFGEWNVIRDKWNAEYDDIHLKKKAVVTEKYEDDRRKSFKKIGSFSLEQLQEYADADLSVVEKLKEIIIQKVDEIYKVYGSSEKLFDADFVLEKSLKKNDAVVAIMKDLLDSVKSFENYIKAFFGEGKETNRDESFYGDFVLAYDILLKVDHIYDAIRNYVTQKPYSKDKFKLYFQNPQFMGGWDKDKETDYRATILRYGSKYYLAIMDKKYAKCLQKIDKDDVNGNYEKINYKLLPGPNKMLPKVFFSKKWMAYYNPSEDIQKIYKNGTFKKGDMFNLNDCHKLIDFFKDSISRYPKWSNAYDFNFSETEKYKDIAGFYREVEEQGYKVSFESASKKEVDKLVEEGKLYMFQIYNKDFSDKSHGTPNLHTMYFKLLFDENNHGQIRLSGGAELFMRRASLKKEELVVHPANSPIANKNPDNPKKTTTLSYDVYKDKRFSEDQYELHIPIAINKCPKNIFKINTEVRVLLKHDDNPYVIGIARGERNLLYIVVVDGKGNIVEQYSLNEIINNFNGIRIKTDYHSLLDKKEKERFEARQNWTSIENIKELKAGYISQVVHKICELVEKYDAVIALEDLNSGFKNSRVKVEKQVYQKFEKMLIDKLNYMVDKKSNPCATGGALKGYQITNKFESFKSMSTQNGFIFYIPAWLTSKIDPSTGFVNLLKTKYTSIADSKKFISSFDRIMYVPEEDLFEFALDYKNFSRTDADYIKKWKLYSYGNRIRIFRNPKKNNVFDWEEVCLTSAYKELFNKYGINYQQGDIRALLCEQSDKAFYSSFMALMSLMLQMRNSITGRTDVDFLISPVKNSDGIFYDSRNYEAQENAILPKNADANGAYNIARKVLWAIGQFKKAEDEKLDKVKIAISNKEWLEYAQTSVKH

SEQ ID NO: 141 - protein, 1322 aa, synthetic construct
MSKLEKFTNCYSLSKTLRFKAIPVGKTQENIDNKRLLVEDEKRAEDYKGVKKLLDRYYLSFINDVLHSIKLKNLNNYISLFRKKTRTEKENKELENLEINLRKEIAKAFKGNEGYKSLFKKDIIETILPEFLDDKDEIALVNSFNGFTTAFTGFFDNRENMFSEEAKSTSIAFRCINENLTRYISNMDIFEKVDAIFDKHEVQEIKEKILNSDYDVEDFFEGEFFNFVLTQEGIDVYNAIIGGFVTESGGSSGMELKHSISDYTEAEFLQLVTTICNADTSSEEELVKLVTHFEEMTEHPSGSDLIYYPKEGDDDSPSGIVNTVKQWRAANGKSGFKQGGSSGEKIKGLNEYINLYNQKTKQKLPKFKPLYKQVLSDRESLSFYGEGYTSDEEVLEVFRNTLNKNSEIFSSIKKLEKLFKNFDEYSSAGIFVKNGPAISTISKDIFGEWNVIRDKWNAEYDDIHLKKKAVVTEKYEDDRRKSFKKIGSFSLEQLQEYADADLSVVEKLKEIIIQKVDEIYKVYGSSEKLFDADFVLEKSLKKNDAVVAIMKDLLDSVKSFENYIKAFFGEGKETNRDESFYGDFVLAYDILLKVDHIYDAIRNYVTQKPYSKDKFKLYFQNPQFMGGWDKDKETDYRATILRYGSKYYLAIMDKKYAKCLQKIDKDDVNGNYEKINYKLLPGPNKMLPKVFFSKKWMAYYNPSEDIQKIYKNGTFKKGDMFNLNDCHKLIDFFKDSISRYPKWSNAYDFNFSETEKYKDIAGFYREVEEQGYKVSFESASKKEVDKLVEEGKLYMFQIYNKDFSDKSHGTPNLHTMYFKLLFDENNHGQIRLSGGAELFMRRASLKKEELVVHPANSPIANKNPDNPKKTTTLSYDVYKDKRFSEDQYELHIPIAINKCPKNIFKINTEVRVLLKHDDNPYVIGIARGERNLLYIVVVDGKGNIVEQYSLNEIINNFNGIRIKTDYHSLLDKKEKERFEARQNWTSIENIKELKAGYISQVVHKICELVEKYDAVIALEDLNSGFKNSRVKVEKQVYQKFEKMLIDKLNYMVDKKSNPCATGGALKGYQITNKFESFKSMSTQNGFIFYIPAWLTSKIDPSTGFVNLLKTKYTSIADSKKFISSFDRIMYVPEEDLFEFALDYKNFSRTDADYIKKWKLYSYGNRIRIFRNPKKNNVFDWEEVCLTSAYKELFNKYGINYQQGDIRALLCEQSDKAFYSSFMALMSLMLQMRNSITGRTDVDFLISPVKNSDGIFYDSRNYEAQENAILPKNADANGAYNIARKVLWAIGQFKKAEDEKLDKVKIAISNKEWLEYAQTSVKH

SEQ ID NO: 142 - protein, 1503 aa, synthetic construct
MSKLEKFTNCYSLSKTLRFKAIPVGKTQENIDNKRLLVEDEKRAEDYKGVKKLLDRYYLSFINDVLHSIKLKNLNNYISLFRKKTRTEKENKELENLEINLRKEIAKAFKGNEGYKSLFKKDIIETILPEFLDDKDEIALVNSFNGFTTAFTGFFDNRENMFSEEAKSTSIAFRCINENLTRYISNMDIFEKVDAIFDKHEVQEIKEKILNSDYDVEDFFEGEFFNFVLTQEGIDVYNAIIGGFVTESGGSSGWGNLGHETVAYIAQSFVASSTESFCQNILGDDSTSYLANVATWADTYKYTDAGEFSKPYHFIDAQDNPPQSCGVDYDRDCGSAGCSISAIQNYTNILLESPNGSEALNALKFVVHIIGDIHQPLHDENLEAGGNGIDVTYDGETTNLHHIWDTNMPEEAAGGYSLSVAKTYADLLTERIKTGTYSSKKDSWTDGIDIKDPVSTSMIWAADANTYVCSTVLDDGLAYINSTDLSGEYYDKSQPVFEELIAKAGYRLAAWLDLIASQPSGSSGEKIKGLNEYINLYNQKTKQKLPKFKPLYKQVLSDRESLSFYGEGYTSDEEVLEVFRNTLNKNSEIFSSIKKLEKLFKNFDEYSSAGIFVKNGPAISTISKDIFGEWNVIRDKWNAEYDDIHLKKKAVVTEKYEDDRRKSFKKIGSFSLEQLQEYADADLSVVEKLKEIIIQKVDEIYKVYGSSEKLFDADFVLEKSLKKNDAVVAIMKDLLDSVKSFENYIKAFFGEGKETNRDESFYGDFVLAYDILLKVDHIYDAIRNYVTQKPYSKDKFKLYFQNPQFMGGWDKDKETDYRATILRYGSKYYLAIMDKKYAKCLQKIDKDDVNGNYEKINYKLLPGPNKMLPKVFFSKKWMAYYNPSEDIQKIYKNGTFKKGDMFNLNDCHKLIDFFKDSISRYPKWSNAYDFNFSETEKYKDIAGFYREVEEQGYKVSFESASKKEVDKLVEEGKLYMFQIYNKDFSDKSHGTPNLHTMYFKLLFDENNHGQIRLSGGAELFMRRASLKKEELVVHPANSPIANKNPDNPKKTTTLSYDVYKDKRFSEDQYELHIPIAINKCPKNIFKINTEVRVLLKHDDNPYVIGIARGERNLLYIVVVDGKGNIVEQYSLNEIINNFNGIRIKTDYHSLLDKKEKERFEARQNWTSIENIKELKAGYISQVVHKICELVEKYDAVIALEDLNSGFKNSRVKVEKQVYQKFEKMLIDKLNYMVDKKSNPCATGGALKGYQITNKFESFKSMSTQNGFIFYIPAWLTSKIDPSTGFVNLLKTKYTSIADSKKFISSFDRIMYVPEEDLFEFALDYKNFSRTDADYIKKWKLYSYGNRIRIFRNPKKNNVFDWEEVCLTSAYKELFNKYGINYQQGDIRALLCEQSDKAFYSSFMALMSLMLQMRNSITGRTDVDFLISPVKNSDGIFYDSRNYEAQENAILPKNADANGAYNIARKVLWAIGQFKKAEDEKLDKVKIAISNKEWLEYAQTSVKH

SEQ ID NO: 143 - protein, 1506 aa, synthetic construct
MSKLEKFTNCYSLSKTLRFKAIPVGKTQENIDNKRLLVEDEKRAEDYKGVKKLLDRYYLSFINDVLHSIKLKNLNNYISLFRKKTRTEKENKELENLEINLRKEIAKAFKGNEGYKSLFKKDIIETILPEFLDDKDEIALVNSFNGFTTAFTGFFDNRENMFSEEAKSTSIAFRCINENLTRYISNMDIFEKVDAIFDKHEVQEIKEKILNSDYDVEDFFEGEFFNFVLTQEGIDVYNAIIGGFVTESGGSSGWGALGHATVAYVAQHYVSPEAASWAQGILGSSSSSYLASIASWADEYRLTSAGKWSASLHFIDAEDNPPTNCNVDYERDCGSSGCSISAIANYTQRVSDSSLSSENHAEALRFLVHFIGDMTQPLHDEAYAVGGNKINVTFDGYHDNLHSDWDTYMPQKLIGGHALSDAESWAKTLVQNIESGNYTAQAIGWIKGDNISEPITTATRWASDANALVCTVVMPHGAAALQTGDLYPTYYDSVIDTIELQIAKGGYRLANWINEIHGSEIAKGSSGEKIKGLNEYINLYNQKTKQKLPKFKPLYKQVLSDRESLSFYGEGYTSDEEVLEVFRNTLNKNSEIFSSIKKLEKLFKNFDEYSSAGIFVKNGPAISTISKDIFGEWNVIRDKWNAEYDDIHLKKKAVVTEKYEDDRRKSFKKIGSFSLEQLQEYADADLSVVEKLKEIIIQKVDEIYKVYGSSEKLFDADFVLEKSLKKNDAVVAIMKDLLDSVKSFENYIKAFFGEGKETNRDESFYGDFVLAYDILLKVDHIYDAIRNYVTQKPYSKDKFKLYFQNPQFMGGWDKDKETDYRATILRYGSKYYLAIMDKKYAKCLQKIDKDDVNGNYEKINYKLLPGPNKMLPKVFFSKKWMAYYNPSEDIQKIYKNGTFKKGDMFNLNDCHKLIDFFKDSISRYPKWSNAYDFNFSETEKYKDIAGFYREVEEQGYKVSFESASKKEVDKLVEEGKLYMFQIYNKDFSDKSHGTPNLHTMYFKLLFDENNHGQIRLSGGAELFMRRASLKKEELVVHPANSPIANKNPDNPKKTTTLSYDVYKDKRFSEDQYELHIPIAINKCPKNIFKINTEVRVLLKHDDNPYVIGIARGERNLLYIVVVDGKGNIVEQYSLNEIINNFNGIRIKTDYHSLLDKKEKERFEARQNWTSIENIKELKAGYISQVVHKICELVEKYDAVIALEDLNSGFKNSRVKVEKQVYQKFEKMLIDKLNYMVDKKSNPCATGGALKGYQITNKFESFKSMSTQNGFIFYIPAWLTSKIDPSTGFVNLLKTKYTSIADSKKFISSFDRIMYVPEEDLFEFALDYKNFSRTDADYIKKWKLYSYGNRIRIFRNPKKNNVFDWEEVCLTSAYKELFNKYGINYQQGDIRALLCEQSDKAFYSSFMALMSLMLQMRNSITGRTDVDFLISPVKNSDGIFYDSRNYEAQENAILPKNADANGAYNIARKVLWAIGQFKKAEDEKLDKVKIAISNKEWLEYAQTSVKH

SEQ ID NO: 144 - protein, 1341 aa, synthetic construct
MSKLEKFTNCYSLSKTLRFKAIPVGKTQENIDNKRLLVEDEKRAEDYKGVKKLLDRYYLSFINDVLHSIKLKNLNNYISLFRKKTRTEKENKELENLEINLRKEIAKAFKGNEGYKSLFKKDIIETILPEFLDDKDEIALVNSFNGFTTAFTGFFDNRENMFSEEAKSTSIAFRCINENLTRYISNMDIFEKVDAIFDKHEVQEIKEKILNSDYDVEDFFEGEFFNFVLTQEGIDVYNAIIGGFVTESGGSSGMEWKDIKGYEGHYQVSNTGEVYSIKSGKTLKHQIPKDGYHRIGLFKGGKGKTFQVHRLVAIHFCEGYEEGLVVDHKDGNKDNNLSTNLRWVTQKINVENQMSRGTGSSGEKIKGLNEYINLYNQKTKQKLPKFKPLYKQVLSDRESLSFYGEGYTSDEEVLEVFRNTLNKNSEIFSSIKKLEKLFKNFDEYSSAGIFVKNGPAISTISKDIFGEWNVIRDKWNAEYDDIHLKKKAVVTEKYEDDRRKSFKKIGSFSLEQLQEYADADLSVVEKLKEIIIQKVDEIYKVYGSSEKLFDADFVLEKSLKKNDAVVAIMKDLLDSVKSFENYIKAFFGEGKETNRDESFYGDFVLAYDILLKVDHIYDAIRNYVTQKPYSKDKFKLYFQNPQFMGGWDKDKETDYRATILRYGSKYYLAIMDKKYAKCLQKIDKDDVNGNYEKINYKLLPGPNKMLPKVFFSKKWMAYYNPSEDIQKIYKNGTFKKGDMFNLNDCHKLIDFFKDSISRYPKWSNAYDFNFSETEKYKDIAGFYREVEEQGYKVSFESASKKEVDKLVEEGKLYMFQIYNKDFSDKSHGTPNLHTMYFKLLFDENNHGQIRLSGGAELFMRRASLKKEELVVHPANSPIANKNPDNPKKTTTLSYDVYKDKRFSEDQYELHIPIAINKCPKNIFKINTEVRVLLKHDDNPYVIGIARGERNLLYIVVVDGKGNIVEQYSLNEIINNFNGIRIKTDYHSLLDKKEKERFEARQNWTSIENIKELKAGYISQVVHKICELVEKYDAVIALEDLNSGFKNSRVKVEKQVYQKFEKMLIDKLNYMVDKKSNPCATGGALKGYQITNKFESFKSMSTQNGFIFYIPAWLTSKIDPSTGFVNLLKTKYTSIADSKKFISSFDRIMYVPEEDLFEFALDYKNFSRTDADYIKKWKLYSYGNRIRIFRNPKKNNVFDWEEVCLTSAYKELFNKYGINYQQGDIRALLCEQSDKAFYSSFMALMSLMLQMRNSITGRTDVDFLISPVKNSDGIFYDSRNYEAQENAILPKNADANGAYNIARKVLWAIGQFKKAEDEKLDKVKIAISNKEWLEYAQTSVKH

SEQ ID NO: 145 - protein, 1346 aa, synthetic construct
MSKLEKFTNCYSLSKTLRFKAIPVGKTQENIDNKRLLVEDEKRAEDYKGVKKLLDRYYLSFINDVLHSIKLKNLNNYISLFRKKTRTEKENKELENLEINLRKEIAKAFKGNEGYKSLFKKDIIETILPEFLDDKDEIALVNSFNGFTTAFTGFFDNRENMFSEEAKSTSIAFRCINENLTRYISNMDIFEKVDAIFDKHEVQEIKEKILNSDYDVEDFFEGEFFNFVLTQEGIDVYNAIIGGFVTESGGSSGGRTPTAEERRIANALGALPCIACYMHGVISNEVSLHHIAGRTAPGCHKKQLPLCRWHHQHAAPAEVREKYPWLVPVHADGVVGGKKEFTLLNKSEMELLADAYEMANIMHGSSGEKIKGLNEYINLYNQKTKQKLPKFKPLYKQVLSDRESLSFYGEGYTSDEEVLEVFRNTLNKNSEIFSSIKKLEKLFKNFDEYSSAGIFVKNGPAISTISKDIFGEWNVIRDKWNAEYDDIHLKKKAVVTEKYEDDRRKSFKKIGSFSLEQLQEYADADLSVVEKLKEIIIQKVDEIYKVYGSSEKLFDADFVLEKSLKKNDAVVAIMKDLLDSVKSFENYIKAFFGEGKETNRDESFYGDFVLAYDILLKVDHIYDAIRNYVTQKPYSKDKFKLYFQNPQFMGGWDKDKETDYRATILRYGSKYYLAIMDKKYAKCLQKIDKDDVNGNYEKINYKLLPGPNKMLPKVFFSKKWMAYYNPSEDIQKIYKNGTFKKGDMFNLNDCHKLIDFFKDSISRYPKWSNAYDFNFSETEKYKDIAGFYREVEEQGYKVSFESASKKEVDKLVEEGKLYMFQIYNKDFSDKSHGTPNLHTMYFKLLFDENNHGQIRLSGGAELFMRRASLKKEELVVHPANSPIANKNPDNPKKTTTLSYDVYKDKRFSEDQYELHIPIAINKCPKNIFKINTEVRVLLKHDDNPYVIGIARGERNLLYIVVVDGKGNIVEQYSLNEIINNFNGIRIKTDYHSLLDKKEKERFEARQNWTSIENIKELKAGYISQVVHKICELVEKYDAVIALEDLNSGFKNSRVKVEKQVYQKFEKMLIDKLNYMVDKKSNPCATGGALKGYQITNKFESFKSMSTQNGFIFYIPAWLTSKIDPSTGFVNLLKTKYTSIADSKKFISSFDRIMYVPEEDLFEFALDYKNFSRTDADYIKKWKLYSYGNRIRIFRNPKKNNVFDWEEVCLTSAYKELFNKYGINYQQGDIRALLCEQSDKAFYSSFMALMSLMLQMRNSITGRTDVDFLISPVKNSDGIFYDSRNYEAQENAILPKNADANGAYNIARKVLWAIGQFKKAEDEKLDKVKIAISNKEWLEYAQTSVKH

SEQ ID NO: 146 - protein, 1513 aa, synthetic construct
MSKLEKFTNCYSLSKTLRFKAIPVGKTQENIDNKRLLVEDEKRAEDYKGVKKLLDRYYLSFINDVLHSIKLKNLNNYISLFRKKTRTEKENKELENLEINLRKEIAKAFKGNEGYKSLFKKDIIETILPEFLDDKDEIALVNSFNGFTTAFTGFFDNRENMFSEEAKSTSIAFRCINENLTRYISNMDIFEKVDAIFDKHEVQEIKEKILNSDYDVEDFFEGEFFNFVLTQEGIDVYNAIIGGFVTESGGSSGWSKEGHVMTCRIAQGLLNDEAAHAVKMLLPEYVNGDLSALCVWPDQVRHWYKYKWTSPLHFIDTPDKACNFDYERDCHDQHGVKDMCVAGAIQNFTTQLSHYREGTSDRRYNMTEALLFLSHFMGDIHQPMHVGFTSDAGGNSIDLRWFRHKSNLHHVWDREIILTAAKDYYAKDINLLEEDIEGNFTDGIWSDDLASWRECGNVFSCVNKFATESINIACKWGYKGVEAGETLSDDYFNSRLPIVMKRVAQGGIRLAMLLNNVFGASQQEDSVVATGSSGEKIKGLNEYINLYNQKTKQKLPKFKPLYKQVLSDRESLSFYGEGYTSDEEVLEVFRNTLNKNSEIFSSIKKLEKLFKNFDEYSSAGIFVKNGPAISTISKDIFGEWNVIRDKWNAEYDDIHLKKKAVVTEKYEDDRRKSFKKIGSFSLEQLQEYADADLSVVEKLKEIIIQKVDEIYKVYGSSEKLFDADFVLEKSLKKNDAVVAIMKDLLDSVKSFENYIKAFFGEGKETNRDESFYGDFVLAYDILLKVDHIYDAIRNYVTQKPYSKDKFKLYFQNPQFMGGWDKDKETDYRATILRYGSKYYLAIMDKKYAKCLQKIDKDDVNGNYEKINYKLLPGPNKMLPKVFFSKKWMAYYNPSEDIQKIYKNGTFKKGDMFNLNDCHKLIDFFKDSISRYPKWSNAYDFNFSETEKYKDIAGFYREVEEQGYKVSFESASKKEVDKLVEEGKLYMFQIYNKDFSDKSHGTPNLHTMYFKLLFDENNHGQIRLSGGAELFMRRASLKKEELVVHPANSPIANKNPDNPKKTTTLSYDVYKDKRFSEDQYELHIPIAINKCPKNIFKINTEVRVLLKHDDNPYVIGIARGERNLLYIVVVDGKGNIVEQYSLNEIINNFNGIRIKTDYHSLLDKKEKERFEARQNWTSIENIKELKAGYISQVVHKICELVEKYDAVIALEDLNSGFKNSRVKVEKQVYQKFEKMLIDKLNYMVDKKSNPCATGGALKGYQITNKFESFKSMSTQNGFIFYIPAWLTSKIDPSTGFVNLLKTKYTSIADSKKFISSFDRIMYVPEEDLFEFALDYKNFSRTDADYIKKWKLYSYGNRIRIFRNPKKNNVFDWEEVCLTSAYKELFNKYGINYQQGDIRALLCEQSDKAFYSSFMALMSLMLQMRNSITGRTDVDFLISPVKNSDGIFYDSRNYEAQENAILPKNADANGAYNIARKVLWAIGQFKKAEDEKLDKVKIAISNKEWLEYAQTSVKH

SEQ ID NO: 147 - protein, 1446 aa, synthetic construct
MSKLEKFTNCYSLSKTLRFKAIPVGKTQENIDNKRLLVEDEKRAEDYKGVKKLLDRYYLSFINDVLHSIKLKNLNNYISLFRKKTRTEKENKELENLEINLRKEIAKAFKGNEGYKSLFKKDIIETILPEFLDDKDEIALVNSFNGFTTAFTGFFDNRENMFSEEAKSTSIAFRCINENLTRYISNMDIFEKVDAIFDKHEVQEIKEKILNSDYDVEDFFEGEFFNFVLTQEGIDVYNAIIGGFVTESGGSSGPPSSFSKAKKEAVKIYLDYPTSFYCGCDITWKNKKKGIPELESCGYQVRKQEKRASRIEWEHVVPAWQFGHQRQCWQKGGRKNCTRNDKQFKSMEADLHNLVPAIGEVNGDRSNFRFSQWNGSKGAFYGQCAFKVDFKGRVAEPPAQSRGAIARTYLYMNNEYKFNLSKAQRQLMEAWNKQYPVSTWECTRDERIAKIQGNHNQFVYKACGSSGEKIKGLNEYINLYNQKTKQKLPKFKPLYKQVLSDRESLSFYGEGYTSDEEVLEVFRNTLNKNSEIFSSIKKLEKLFKNFDEYSSAGIFVKNGPAISTISKDIFGEWNVIRDKWNAEYDDIHLKKKAVVTEKYEDDRRKSFKKIGSFSLEQLQEYADADLSVVEKLKEIIIQKVDEIYKVYGSSEKLFDADFVLEKSLKKNDAVVAIMKDLLDSVKSFENYIKAFFGEGKETNRDESFYGDFVLAYDILLKVDHIYDAIRNYVTQKPYSKDKFKLYFQNPQFMGGWDKDKETDYRATILRYGSKYYLAIMDKKYAKCLQKIDKDDVNGNYEKINYKLLPGPNKMLPKVFFSKKWMAYYNPSEDIQKIYKNGTFKKGDMFNLNDCHKLIDFFKDSISRYPKWSNAYDFNFSETEKYKDIAGFYREVEEQGYKVSFESASKKEVDKLVEEGKLYMFQIYNKDFSDKSHGTPNLHTMYFKLLFDENNHGQIRLSGGAELFMRRASLKKEELVVHPANSPIANKNPDNPKKTTTLSYDVYKDKRFSEDQYELHIPIAINKCPKNIFKINTEVRVLLKHDDNPYVIGIARGERNLLYIVVVDGKGNIVEQYSLNEIINNFNGIRIKTDYHSLLDKKEKERFEARQNWTSIENIKELKAGYISQVVHKICELVEKYDAVIALEDLNSGFKNSRVKVEKQVYQKFEKMLIDKLNYMVDKKSNPCATGGALKGYQITNKFESFKSMSTQNGFIFYIPAWLTSKIDPSTGFVNLLKTKYTSIADSKKFISSFDRIMYVPEEDLFEFALDYKNFSRTDADYIKKWKLYSYGNRIRIFRNPKKNNVFDWEEVCLTSAYKELFNKYGINYQQGDIRALLCEQSDKAFYSSFMALMSLMLQMRNSITGRTDVDFLISPVKNSDGIFYDSRNYEAQENAILPKNADANGAYNIARKVLWAIGQFKKAEDEKLDKVKIAISNKEWLEYAQTSVKH

SEQ ID NO: 148 - protein, 1304 aa, synthetic construct
MSKLEKFTNCYSLSKTLRFKAIPVGKTQENIDNKRLLVEDEKRAEDYKGVKKLLDRYYLSFINDVLHSIKLKNLNNYISLFRKKTRTEKENKELENLEINLRKEIAKAFKGNEGYKSLFKKDIIETILPEFLDDKDEIALVNSFNGFTTAFTGFFDNRENMFSEEAKSTSIAFRCINENLTRYISNMDIFEKVDAIFDKHEVQEIKEKILNSDYDVEDFFEGEFFNFVLTQEGIDVYNAIIGGFVTESGGSSGRLREQALMRDKGLCLHCKNNRKIKVADMVDHIIPIKVDPSLKLKLENLQSLCNPCHNRKTAEDKKKYGGSSGEKIKGLNEYINLYNQKTKQKLPKFKPLYKQVLSDRESLSFYGEGYTSDEEVLEVFRNTLNKNSEIFSSIKKLEKLFKNFDEYSSAGIFVKNGPAISTISKDIFGEWNVIRDKWNAEYDDIHLKKKAVVTEKYEDDRRKSFKKIGSFSLEQLQEYADADLSVVEKLKEIIIQKVDEIYKVYGSSEKLFDADFVLEKSLKKNDAVVAIMKDLLDSVKSFENYIKAFFGEGKETNRDESFYGDFVLAYDILLKVDHIYDAIRNYVTQKPYSKDKFKLYFQNPQFMGGWDKDKETDYRATILRYGSKYYLAIMDKKYAKCLQKIDKDDVNGNYEKINYKLLPGPNKMLPKVFFSKKWMAYYNPSEDIQKIYKNGTFKKGDMFNLNDCHKLIDFFKDSISRYPKWSNAYDFNFSETEKYKDIAGFYREVEEQGYKVSFESASKKEVDKLVEEGKLYMFQIYNKDFSDKSHGTPNLHTMYFKLLFDENNHGQIRLSGGAELFMRRASLKKEELVVHPANSPIANKNPDNPKKTTTLSYDVYKDKRFSEDQYELHIPIAINKCPKNIFKINTEVRVLLKHDDNPYVIGIARGERNLLYIVVVDGKGNIVEQYSLNEIINNFNGIRIKTDYHSLLDKKEKERFEARQNWTSIENIKELKAGYISQVVHKICELVEKYDAVIALEDLNSGFKNSRVKVEKQVYQKFEKMLIDKLNYMVDKKSNPCATGGALKGYQITNKFESFKSMSTQNGFIFYIPAWLTSKIDPSTGFVNLLKTKYTSIADSKKFISSFDRIMYVPEEDLFEFALDYKNFSRTDADYIKKWKLYSYGNRIRIFRNPKKNNVFDWEEVCLTSAYKELFNKYGINYQQGDIRALLCEQSDKAFYSSFMALMSLMLQMRNSITGRTDVDFLISPVKNSDGIFYDSRNYEAQENAILPKNADANGAYNIARKVLWAIGQFKKAEDEKLDKVKIAISNKEWLEYAQTSVKH

SEQ ID NO: 149 - protein, 1356 aa, synthetic construct
MSKLEKFTNCYSLSKTLRFKAIPVGKTQENIDNKRLLVEDEKRAEDYKGVKKLLDRYYLSFINDVLHSIKLKNLNNYISLFRKKTRTEKENKELENLEINLRKEIAKAFKGNEGYKSLFKKDIIETILPEFLDDKDEIALVNSFNGFTTAFTGFFDNRENMFSEEAKSTSIAFRCINENLTRYISNMDIFEKVDAIFDKHEVQEIKEKILNSDYDVEDFFEGEFFNFVLTQEGIDVYNAIIGGFVTESGGSSGSNNSYLRAKVFETEHGVCQLCNVNAQELFLRLRDAPKSQRKNLLYATWTSKLPLEQLNEMIRNPGEGHFWQVDHIKPVYGGGGQCSLDNLQTLCTVCHKERTARQAKERSQVRRQSLASKGSSGEKIKGLNEYINLYNQKTKQKLPKFKPLYKQVLSDRESLSFYGEGYTSDEEVLEVFRNTLNKNSEIFSSIKKLEKLFKNFDEYSSAGIFVKNGPAISTISKDIFGEWNVIRDKWNAEYDDIHLKKKAVVTEKYEDDRRKSFKKIGSFSLEQLQEYADADLSVVEKLKEIIIQKVDEIYKVYGSSEKLFDADFVLEKSLKKNDAVVAIMKDLLDSVKSFENYIKAFFGEGKETNRDESFYGDFVLAYDILLKVDHIYDAIRNYVTQKPYSKDKFKLYFQNPQFMGGWDKDKETDYRATILRYGSKYYLAIMDKKYAKCLQKIDKDDVNGNYEKINYKLLPGPNKMLPKVFFSKKWMAYYNPSEDIQKIYKNGTFKKGDMFNLNDCHKLIDFFKDSISRYPKWSNAYDFNFSETEKYKDIAGFYREVEEQGYKVSFESASKKEVDKLVEEGKLYMFQIYNKDFSDKSHGTPNLHTMYFKLLFDENNHGQIRLSGGAELFMRRASLKKEELVVHPANSPIANKNPDNPKKTTTLSYDVYKDKRFSEDQYELHIPIAINKCPKNIFKINTEVRVLLKHDDNPYVIGIARGERNLLYIVVVDGKGNIVEQYSLNEIINNFNGIRIKTDYHSLLDKKEKERFEARQNWTSIENIKELKAGYISQVVHKICELVEKYDAVIALEDLNSGFKNSRVKVEKQVYQKFEKMLIDKLNYMVDKKSNPCATGGALKGYQITNKFESFKSMSTQNGFIFYIPAWLTSKIDPSTGFVNLLKTKYTSIADSKKFISSFDRIMYVPEEDLFEFALDYKNFSRTDADYIKKWKLYSYGNRIRIFRNPKKNNVFDWEEVCLTSAYKELFNKYGINYQQGDIRALLCEQSDKAFYSSFMALMSLMLQMRNSITGRTDVDFLISPVKNSDGIFYDSRNYEAQENAILPKNADANGAYNIARKVLWAIGQFKKAEDEKLDKVKIAISNKEWLEYAQTSVKH

SEQ ID NO: 150 - protein, 1403 aa, synthetic construct
MSKLEKFTNCYSLSKTLRFKAIPVGKTQENIDNKRLLVEDEKRAEDYKGVKKLLDRYYLSFINDVLHSIKLKNLNNYISLFRKKTRTEKENKELENLEINLRKEIAKAFKGNEGYKSLFKKDIIETILPEFLDDKDEIALVNSFNGFTTAFTGFFDNRENMFSEEAKSTSIAFRCINENLTRYISNMDIFEKVDAIFDKHEVQEIKEKILNSDYDVEDFFEGEFFNFVLTQEGIDVYNAIIGGFVTESGGSSGVREGFVTEKRAREMDGDMRRRAARNAKLFQEMQEKLNVQGKPSRADLWRYQSVQRQNCQCAYCGSPITFSNSEMDHIVPRAGQGSTNTRENLVAVCHRCNQSKGNTPFAIWAKNTSIEGVSVKEAVERTRHWVTDTGMRSTDFKKFTKAVVERFQRATMDEEIDARSGSSGEKIKGLNEYINLYNQKTKQKLPKFKPLYKQVLSDRESLSFYGEGYTSDEEVLEVFRNTLNKNSEIFSSIKKLEKLFKNFDEYSSAGIFVKNGPAISTISKDIFGEWNVIRDKWNAEYDDIHLKKKAVVTEKYEDDRRKSFKKIGSFSLEQLQEYADADLSVVEKLKEIIIQKVDEIYKVYGSSEKLFDADFVLEKSLKKNDAVVAIMKDLLDSVKSFENYIKAFFGEGKETNRDESFYGDFVLAYDILLKVDHIYDAIRNYVTQKPYSKDKFKLYFQNPQFMGGWDKDKETDYRATILRYGSKYYLAIMDKKYAKCLQKIDKDDVNGNYEKINYKLLPGPNKMLPKVFFSKKWMAYYNPSEDIQKIYKNGTFKKGDMFNLNDCHKLIDFFKDSISRYPKWSNAYDFNFSETEKYKDIAGFYREVEEQGYKVSFESASKKEVDKLVEEGKLYMFQIYNKDFSDKSHGTPNLHTMYFKLLFDENNHGQIRLSGGAELFMRRASLKKEELVVHPANSPIANKNPDNPKKTTTLSYDVYKDKRFSEDQYELHIPIAINKCPKNIFKINTEVRVLLKHDDNPYVIGIARGERNLLYIVVVDGKGNIVEQYSLNEIINNFNGIRIKTDYHSLLDKKEKERFEARQNWTSIENIKELKAGYISQVVHKICELVEKYDAVIALEDLNSGFKNSRVKVEKQVYQKFEKMLIDKLNYMVDKKSNPCATGGALKGYQITNKFESFKSMSTQNGFIFYIPAWLTSKIDPSTGFVNLLKTKYTSIADSKKFISSFDRIMYVPEEDLFEFALDYKNFSRTDADYIKKWKLYSYGNRIRIFRNPKKNNVFDWEEVCLTSAYKELFNKYGINYQQGDIRALLCEQSDKAFYSSFMALMSLMLQMRNSITGRTDVDFLISPVKNSDGIFYDSRNYEAQENAILPKNADANGAYNIARKVLWAIGQFKKAEDEKLDKVKIAISNKEWLEYAQTSVKH

SEQ ID NO: 151 - protein, 1380 aa, synthetic construct
MSKLEKFTNCYSLSKTLRFKAIPVGKTQENIDNKRLLVEDEKRAEDYKGVKKLLDRYYLSFINDVLHSIKLKNLNNYISLFRKKTRTEKENKELENLEINLRKEIAKAFKGNEGYKSLFKKDIIETILPEFLDDKDEIALVNSFNGFTTAFTGFFDNRENMFSEEAKSTSIAFRCINENLTRYISNMDIFEKVDAIFDKHEVQEIKEKILNSDYDVEDFFEGEFFNFVLTQEGIDVYNAIIGGFVTESGGSSGENQFTNQGRRNSQQRLKGLTDSIKEFGSQILKEHPVENSQLQNDRLFLYYLQNGRDMYTGEELDIDYLSQYDIDHIIPQAFIKDNSIDNRVLTSSKENRGKSDDVPSKDVVRKMKSYWSKLLSAKLITQRKFDNLTKAERGGLTGSSGEKIKGLNEYINLYNQKTKQKLPKFKPLYKQVLSDRESLSFYGEGYTSDEEVLEVFRNTLNKNSEIFSSIKKLEKLFKNFDEYSSAGIFVKNGPAISTISKDIFGEWNVIRDKWNAEYDDIHLKKKAVVTEKYEDDRRKSFKKIGSFSLEQLQEYADADLSVVEKLKEIIIQKVDEIYKVYGSSEKLFDADFVLEKSLKKNDAVVAIMKDLLDSVKSFENYIKAFFGEGKETNRDESFYGDFVLAYDILLKVDHIYDAIRNYVTQKPYSKDKFKLYFQNPQFMGGWDKDKETDYRATILRYGSKYYLAIMDKKYAKCLQKIDKDDVNGNYEKINYKLLPGPNKMLPKVFFSKKWMAYYNPSEDIQKIYKNGTFKKGDMFNLNDCHKLIDFFKDSISRYPKWSNAYDFNFSETEKYKDIAGFYREVEEQGYKVSFESASKKEVDKLVEEGKLYMFQIYNKDFSDKSHGTPNLHTMYFKLLFDENNHGQIRLSGGAELFMRRASLKKEELVVHPANSPIANKNPDNPKKTTTLSYDVYKDKRFSEDQYELHIPIAINKCPKNIFKINTEVRVLLKHDDNPYVIGIARGERNLLYIVVVDGKGNIVEQYSLNEIINNFNGIRIKTDYHSLLDKKEKERFEARQNWTSIENIKELKAGYISQVVHKICELVEKYDAVIALEDLNSGFKNSRVKVEKQVYQKFEKMLIDKLNYMVDKKSNPCATGGALKGYQITNKFESFKSMSTQNGFIFYIPAWLTSKIDPSTGFVNLLKTKYTSIADSKKFISSFDRIMYVPEEDLFEFALDYKNFSRTDADYIKKWKLYSYGNRIRIFRNPKKNNVFDWEEVCLTSAYKELFNKYGINYQQGDIRALLCEQSDKAFYSSFMALMSLMLQMRNSITGRTDVDFLISPVKNSDGIFYDSRNYEAQENAILPKNADANGAYNIARKVLWAIGQFKKAEDEKLDKVKIAISNKEWLEYAQTSVKH

SEQ ID NO: 152 - protein, 1459 aa, synthetic construct
MSKLEKFTNCYSLSKTLRFKAIPVGKTQENIDNKRLLVEDEKRAEDYKGVKKLLDRYYLSFINDVLHSIKLKNLNNYISLFRKKTRTEKENKELENLEINLRKEIAKAFKGNEGYKSLFKKDIIETILPEFLDDKDEIALVNSFNGFTTAFTGFFDNRENMFSEEAKSTSIAFRCINENLTRYISNMDIFEKVDAIFDKHEVQEIKEKILNSDYDVEDFFEGEFFNFVLTQEGIDVYNAIIGGFVTESGGSSGARVRTYPNVSHANTHYKNTVSSKLLPFTANYQLQLGELDNLNRATFSHIQLQDRHETKDVRTKINYDPVGWHNYQFPYGDGSKSSWVMNRGHLVGYQFCGLNDEPRNLVAMTAWLNTGAYSGANDSNPEGMLYYENRLDSWLALHPDFWLDYKVTPIYSGNEVVPRQIELQYVGIDSSGELLTIRLNSNKESIDENGVTTVILENSAPNINLDYLNGTATPKNGSSGEKIKGLNEYINLYNQKTKQKLPKFKPLYKQVLSDRESLSFYGEGYTSDEEVLEVFRNTLNKNSEIFSSIKKLEKLFKNFDEYSSAGIFVKNGPAISTISKDIFGEWNVIRDKWNAEYDDIHLKKKAVVTEKYEDDRRKSFKKIGSFSLEQLQEYADADLSVVEKLKEIIIQKVDEIYKVYGSSEKLFDADFVLEKSLKKNDAVVAIMKDLLDSVKSFENYIKAFFGEGKETNRDESFYGDFVLAYDILLKVDHIYDAIRNYVTQKPYSKDKFKLYFQNPQFMGGWDKDKETDYRATILRYGSKYYLAIMDKKYAKCLQKIDKDDVNGNYEKINYKLLPGPNKMLPKVFFSKKWMAYYNPSEDIQKIYKNGTFKKGDMFNLNDCHKLIDFFKDSISRYPKWSNAYDFNFSETEKYKDIAGFYREVEEQGYKVSFESASKKEVDKLVEEGKLYMFQIYNKDFSDKSHGTPNLHTMYFKLLFDENNHGQIRLSGGAELFMRRASLKKEELVVHPANSPIANKNPDNPKKTTTLSYDVYKDKRFSEDQYELHIPIAINKCPKNIFKINTEVRVLLKHDDNPYVIGIARGERNLLYIVVVDGKGNIVEQYSLNEIINNFNGIRIKTDYHSLLDKKEKERFEARQNWTSIENIKELKAGYISQVVHKICELVEKYDAVIALEDLNSGFKNSRVKVEKQVYQKFEKMLIDKLNYMVDKKSNPCATGGALKGYQITNKFESFKSMSTQNGFIFYIPAWLTSKIDPSTGFVNLLKTKYTSIADSKKFISSFDRIMYVPEEDLFEFALDYKNFSRTDADYIKKWKLYSYGNRIRIFRNPKKNNVFDWEEVCLTSAYKELFNKYGINYQQGDIRALLCEQSDKAFYSSFMALMSLMLQMRNSITGRTDVDFLISPVKNSDGIFYDSRNYEAQENAILPKNADANGAYNIARKVLWAIGQFKKAEDEKLDKVKIAISNKEWLEYAQTSVKH

SEQ ID NO: 153 - protein, 1506 aa, synthetic construct
MSKLEKFTNCYSLSKTLRFKAIPVGKTQENIDNKRLLVEDEKRAEDYKGVKKLLDRYYLSFINDVLHSIKLKNLNNYISLFRKKTRTEKENKELENLEINLRKEIAKAFKGNEGYKSLFKKDIIETILPEFLDDKDEIALVNSFNGFTTAFTGFFDNRENMFSEEAKSTSIAFRCINENLTRYISNMDIFEKVDAIFDKHEVQEIKEKILNSDYDVEDFFEGEFFNFVLTQEGIDVYNAIIGGFVTESGGSSGAAPNIHGWGKEGHEIICKIAQTRLDETAAKAVKELLPESAEGDLSSLCLWADRVKFRYHWSSPLHYINTPDACSYQYNRDCKDESGEKGRCVAGAIYNYTTQLLSYKTAASSQSQYNLTEALLFVSHFMGDIHQPLHVSYASDKGGNTIEVHWYTRKANLHHIWDSNIIETAEADLYNSALEGMVDALKKNITTEWADQVKRWETCTKKTACPDIYASEGIQAACDWAYKGVTEGDTLEDEYFYSRLPIVYQRLAQGGVRLAATLNRIFGGSSGEKIKGLNEYINLYNQKTKQKLPKFKPLYKQVLSDRESLSFYGEGYTSDEEVLEVFRNTLNKNSEIFSSIKKLEKLFKNFDEYSSAGIFVKNGPAISTISKDIFGEWNVIRDKWNAEYDDIHLKKKAVVTEKYEDDRRKSFKKIGSFSLEQLQEYADADLSVVEKLKEIIIQKVDEIYKVYGSSEKLFDADFVLEKSLKKNDAVVAIMKDLLDSVKSFENYIKAFFGEGKETNRDESFYGDFVLAYDILLKVDHIYDAIRNYVTQKPYSKDKFKLYFQNPQFMGGWDKDKETDYRATILRYGSKYYLAIMDKKYAKCLQKIDKDDVNGNYEKINYKLLPGPNKMLPKVFFSKKWMAYYNPSEDIQKIYKNGTFKKGDMFNLNDCHKLIDFFKDSISRYPKWSNAYDFNFSETEKYKDIAGFYREVEEQGYKVSFESASKKEVDKLVEEGKLYMFQIYNKDFSDKSHGTPNLHTMYFKLLFDENNHGQIRLSGGAELFMRRASLKKEELVVHPANSPIANKNPDNPKKTTTLSYDVYKDKRFSEDQYELHIPIAINKCPKNIFKINTEVRVLLKHDDNPYVIGIARGERNLLYIVVVDGKGNIVEQYSLNEIINNFNGIRIKTDYHSLLDKKEKERFEARQNWTSIENIKELKAGYISQVVHKICELVEKYDAVIALEDLNSGFKNSRVKVEKQVYQKFEKMLIDKLNYMVDKKSNPCATGGALKGYQITNKFESFKSMSTQNGFIFYIPAWLTSKIDPSTGFVNLLKTKYTSIADSKKFISSFDRIMYVPEEDLFEFALDYKNFSRTDADYIKKWKLYSYGNRIRIFRNPKKNNVFDWEEVCLTSAYKELFNKYGINYQQGDIRALLCEQSDKAFYSSFMALMSLMLQMRNSITGRTDVDFLISPVKNSDGIFYDSRNYEAQENAILPKNADANGAYNIARKVLWAIGQFKKAEDEKLDKVKIAISNKEWLEYAQTSVKH

SEQ ID NO: 154 - protein, 1320 aa, synthetic construct
MSKLEKFTNCYSLSKTLRFKAIPVGKTQENIDNKRLLVEDEKRAEDYKGVKKLLDRYYLSFINDVLHSIKLKNLNNYISLFRKKTRTEKENKELENLEINLRKEIAKAFKGNEGYKSLFKKDIIETILPEFLDDKDEIALVNSFNGFTTAFTGFFDNRENMFSEEAKSTSIAFRCINENLTRYISNMDIFEKVDAIFDKHEVQEIKEKILNSDYDVEDFFEGEFFNFVLTQEGIDVYNAIIGGFVTESGGSSGIDGVKLSSTEKKKMDEIAPPKGSVFTCPICEKRSIVGVTANLVHDHNHDTGWGREWICDSCNTGLGRFKDNPKFLEKVIEYLKKGSSGEKIKGLNEYINLYNQKTKQKLPKFKPLYKQVLSDRESLSFYGEGYTSDEEVLEVFRNTLNKNSEIFSSIKKLEKLFKNFDEYSSAGIFVKNGPAISTISKDIFGEWNVIRDKWNAEYDDIHLKKKAVVTEKYEDDRRKSFKKIGSFSLEQLQEYADADLSVVEKLKEIIIQKVDEIYKVYGSSEKLFDADFVLEKSLKKNDAVVAIMKDLLDSVKSFENYIKAFFGEGKETNRDESFYGDFVLAYDILLKVDHIYDAIRNYVTQKPYSKDKFKLYFQNPQFMGGWDKDKETDYRATILRYGSKYYLAIMDKKYAKCLQKIDKDDVNGNYEKINYKLLPGPNKMLPKVFFSKKWMAYYNPSEDIQKIYKNGTFKKGDMFNLNDCHKLIDFFKDSISRYPKWSNAYDFNFSETEKYKDIAGFYREVEEQGYKVSFESASKKEVDKLVEEGKLYMFQIYNKDFSDKSHGTPNLHTMYFKLLFDENNHGQIRLSGGAELFMRRASLKKEELVVHPANSPIANKNPDNPKKTTTLSYDVYKDKRFSEDQYELHIPIAINKCPKNIFKINTEVRVLLKHDDNPYVIGIARGERNLLYIVVVDGKGNIVEQYSLNEIINNFNGIRIKTDYHSLLDKKEKERFEARQNWTSIENIKELKAGYISQVVHKICELVEKYDAVIALEDLNSGFKNSRVKVEKQVYQKFEKMLIDKLNYMVDKKSNPCATGGALKGYQITNKFESFKSMSTQNGFIFYIPAWLTSKIDPSTGFVNLLKTKYTSIADSKKFISSFDRIMYVPEEDLFEFALDYKNFSRTDADYIKKWKLYSYGNRIRIFRNPKKNNVFDWEEVCLTSAYKELFNKYGINYQQGDIRALLCEQSDKAFYSSFMALMSLMLQMRNSITGRTDVDFLISPVKNSDGIFYDSRNYEAQENAILPKNADANGAYNIARKVLWAIGQFKKAEDEKLDKVKIAISNKEWLEYAQTSVKH

SEQ ID NO: 155 - protein, 1333 aa, synthetic construct
MSKLEKFTNCYSLSKTLRFKAIPVGKTQENIDNKRLLVEDEKRAEDYKGVKKLLDRYYLSFINDVLHSIKLKNLNNYISLFRKKTRTEKENKELENLEINLRKEIAKAFKGNEGYKSLFKKDIIETILPEFLDDKDEIALVNSFNGFTTAFTGFFDNRENMFSEEAKSTSIAFRCINENLTRYISNMDIFEKVDAIFDKHEVQEIKEKILNSDYDVEDFFEGEFFNFVLTQEGIDVYNAIIGGFVTESGGSSGMNYFIVEVSEQEVKREKEKARELRRSQWWKNRIARGICHYCGEIFPPEELTMDHLVPVVRGGKSTRGNVVPACKECNNRKKYLLPVEWEEYLDSLESGSSGEKIKGLNEYINLYNQKTKQKLPKFKPLYKQVLSDRESLSFYGEGYTSDEEVLEVFRNTLNKNSEIFSSIKKLEKLFKNFDEYSSAGIFVKNGPAISTISKDIFGEWNVIRDKWNAEYDDIHLKKKAVVTEKYEDDRRKSFKKIGSFSLEQLQEYADADLSVVEKLKEIIIQKVDEIYKVYGSSEKLFDADFVLEKSLKKNDAVVAIMKDLLDSVKSFENYIKAFFGEGKETNRDESFYGDFVLAYDILLKVDHIYDAIRNYVTQKPYSKDKFKLYFQNPQFMGGWDKDKETDYRATILRYGSKYYLAIMDKKYAKCLQKIDKDDVNGNYEKINYKLLPGPNKMLPKVFFSKKWMAYYNPSEDIQKIYKNGTFKKGDMFNLNDCHKLIDFFKDSISRYPKWSNAYDFNFSETEKYKDIAGFYREVEEQGYKVSFESASKKEVDKLVEEGKLYMFQIYNKDFSDKSHGTPNLHTMYFKLLFDENNHGQIRLSGGAELFMRRASLKKEELVVHPANSPIANKNPDNPKKTTTLSYDVYKDKRFSEDQYELHIPIAINKCPKNIFKINTEVRVLLKHDDNPYVIGIARGERNLLYIVVVDGKGNIVEQYSLNEIINNFNGIRIKTDYHSLLDKKEKERFEARQNWTSIENIKELKAGYISQVVHKICELVEKYDAVIALEDLNSGFKNSRVKVEKQVYQKFEKMLIDKLNYMVDKKSNPCATGGALKGYQITNKFESFKSMSTQNGFIFYIPAWLTSKIDPSTGFVNLLKTKYTSIADSKKFISSFDRIMYVPEEDLFEFALDYKNFSRTDADYIKKWKLYSYGNRIRIFRNPKKNNVFDWEEVCLTSAYKELFNKYGINYQQGDIRALLCEQSDKAFYSSFMALMSLMLQMRNSITGRTDVDFLISPVKNSDGIFYDSRNYEAQENAILPKNADANGAYNIARKVLWAIGQFKKAEDEKLDKVKIAISNKEWLEYAQTSVKH

SEQ ID NO: 156 - protein, 1496 aa, synthetic construct
MSKLEKFTNCYSLSKTLRFKAIPVGKTQENIDNKRLLVEDEKRAEDYKGVKKLLDRYYLSFINDVLHSIKLKNLNNYISLFRKKTRTEKENKELENLEINLRKEIAKAFKGNEGYKSLFKKDIIETILPEFLDDKDEIALVNSFNGFTTAFTGFFDNRENMFSEEAKSTSIAFRCINENLTRYISNMDIFEKVDAIFDKHEVQEIKEKILNSDYDVEDFFEGEFFNFVLTQEGIDVYNAIIGGFVTESGGSSGGKAQLDIKNFPELYRTTERVYKKSGQSTKPVTVSNIHYSVLDGYGRSGEAYGIITKDMIDMSAGYREKWESKPEPSGWYSYFFKNTNQRATESDYKHSPKNVSKISNNIKASILLSNGNVRNGYLFDRSHLIADSLGGRPFRNNLITGTRTQNVGNNDRKGGMQYIENKVLDHIKRNPKVHVYYKATPVYQGSELLPRAVLVSALSSDGFIDETVRVFNNVAGFNIDYQNGGLLSSTADVDINNVEENEIETTDDEIEEGGSSGEKIKGLNEYINLYNQKTKQKLPKFKPLYKQVLSDRESLSFYGEGYTSDEEVLEVFRNTLNKNSEIFSSIKKLEKLFKNFDEYSSAGIFVKNGPAISTISKDIFGEWNVIRDKWNAEYDDIHLKKKAVVTEKYEDDRRKSFKKIGSFSLEQLQEYADADLSVVEKLKEIIIQKVDEIYKVYGSSEKLFDADFVLEKSLKKNDAVVAIMKDLLDSVKSFENYIKAFFGEGKETNRDESFYGDFVLAYDILLKVDHIYDAIRNYVTQKPYSKDKFKLYFQNPQFMGGWDKDKETDYRATILRYGSKYYLAIMDKKYAKCLQKIDKDDVNGNYEKINYKLLPGPNKMLPKVFFSKKWMAYYNPSEDIQKIYKNGTFKKGDMFNLNDCHKLIDFFKDSISRYPKWSNAYDFNFSETEKYKDIAGFYREVEEQGYKVSFESASKKEVDKLVEEGKLYMFQIYNKDFSDKSHGTPNLHTMYFKLLFDENNHGQIRLSGGAELFMRRASLKKEELVVHPANSPIANKNPDNPKKTTTLSYDVYKDKRFSEDQYELHIPIAINKCPKNIFKINTEVRVLLKHDDNPYVIGIARGERNLLYIVVVDGKGNIVEQYSLNEIINNFNGIRIKTDYHSLLDKKEKERFEARQNWTSIENIKELKAGYISQVVHKICELVEKYDAVIALEDLNSGFKNSRVKVEKQVYQKFEKMLIDKLNYMVDKKSNPCATGGALKGYQITNKFESFKSMSTQNGFIFYIPAWLTSKIDPSTGFVNLLKTKYTSIADSKKFISSFDRIMYVPEEDLFEFALDYKNFSRTDADYIKKWKLYSYGNRIRIFRNPKKNNVFDWEEVCLTSAYKELFNKYGINYQQGDIRALLCEQSDKAFYSSFMALMSLMLQMRNSITGRTDVDFLISPVKNSDGIFYDSRNYEAQENAILPKNADANGAYNIARKVLWAIGQFKKAEDEKLDKVKIAISNKEWLEYAQTSVKH

SEQ ID NO: 157 - protein, 1380 aa, synthetic construct
MSKLEKFTNCYSLSKTLRFKAIPVGKTQENIDNKRLLVEDEKRAEDYKGVKKLLDRYYLSFINDVLHSIKLKNLNNYISLFRKKTRTEKENKELENLEINLRKEIAKAFKGNEGYKSLFKKDIIETILPEFLDDKDEIALVNSFNGFTTAFTGFFDNRENMFSEEAKSTSIAFRCINENLTRYISNMDIFEKVDAIFDKHEVQEIKEKILNSDYDVEDFFEGEFFNFVLTQEGIDVYNAIIGGFVTESGGSSGENQTTGKGKNNSRPRYKSLEKAIKEFGSQILKEHPTDNQELRNNRLYLYYLQNGKDMYTGQDLDIHNLSNYDIDHIVPQSFITDNSIDNLVLTSSAGNREKGDDVPPLEIVRKRKVFWEKLYQGNLMSKRKFDYLTKAERGGLTGSSGEKIKGLNEYINLYNQKTKQKLPKFKPLYKQVLSDRESLSFYGEGYTSDEEVLEVFRNTLNKNSEIFSSIKKLEKLFKNFDEYSSAGIFVKNGPAISTISKDIFGEWNVIRDKWNAEYDDIHLKKKAVVTEKYEDDRRKSFKKIGSFSLEQLQEYADADLSVVEKLKEIIIQKVDEIYKVYGSSEKLFDADFVLEKSLKKNDAVVAIMKDLLDSVKSFENYIKAFFGEGKETNRDESFYGDFVLAYDILLKVDHIYDAIRNYVTQKPYSKDKFKLYFQNPQFMGGWDKDKETDYRATILRYGSKYYLAIMDKKYAKCLQKIDKDDVNGNYEKINYKLLPGPNKMLPKVFFSKKWMAYYNPSEDIQKIYKNGTFKKGDMFNLNDCHKLIDFFKDSISRYPKWSNAYDFNFSETEKYKDIAGFYREVEEQGYKVSFESASKKEVDKLVEEGKLYMFQIYNKDFSDKSHGTPNLHTMYFKLLFDENNHGQIRLSGGAELFMRRASLKKEELVVHPANSPIANKNPDNPKKTTTLSYDVYKDKRFSEDQYELHIPIAINKCPKNIFKINTEVRVLLKHDDNPYVIGIARGERNLLYIVVVDGKGNIVEQYSLNEIINNFNGIRIKTDYHSLLDKKEKERFEARQNWTSIENIKELKAGYISQVVHKICELVEKYDAVIALEDLNSGFKNSRVKVEKQVYQKFEKMLIDKLNYMVDKKSNPCATGGALKGYQITNKFESFKSMSTQNGFIFYIPAWLTSKIDPSTGFVNLLKTKYTSIADSKKFISSFDRIMYVPEEDLFEFALDYKNFSRTDADYIKKWKLYSYGNRIRIFRNPKKNNVFDWEEVCLTSAYKELFNKYGINYQQGDIRALLCEQSDKAFYSSFMALMSLMLQMRNSITGRTDVDFLISPVKNSDGIFYDSRNYEAQENAILPKNADANGAYNIARKVLWAIGQFKKAEDEKLDKVKIAISNKEWLEYAQTSVKH

SEQ ID NO: 158 - protein, 1323 aa, synthetic construct
MSKLEKFTNCYSLSKTLRFKAIPVGKTQENIDNKRLLVEDEKRAEDYKGVKKLLDRYYLSFINDVLHSIKLKNLNNYISLFRKKTRTEKENKELENLEINLRKEIAKAFKGNEGYKSLFKKDIIETILPEFLDDKDEIALVNSFNGFTTAFTGFFDNRENMFSEEAKSTSIAFRCINENLTRYISNMDIFEKVDAIFDKHEVQEIKEKILNSDYDVEDFFEGEFFNFVLTQEGIDVYNAIIGGFVTESGGSSGMELKNSISDYTEAEFVQLLKEIEKENVAATDDVLDVLLEHFVKITEHPDGTDLIYYPSDNRDDSPEGIVKEIKEWRAANGKPGFKQGGSSGEKIKGLNEYINLYNQKTKQKLPKFKPLYKQVLSDRESLSFYGEGYTSDEEVLEVFRNTLNKNSEIFSSIKKLEKLFKNFDEYSSAGIFVKNGPAISTISKDIFGEWNVIRDKWNAEYDDIHLKKKAVVTEKYEDDRRKSFKKIGSFSLEQLQEYADADLSVVEKLKEIIIQKVDEIYKVYGSSEKLFDADFVLEKSLKKNDAVVAIMKDLLDSVKSFENYIKAFFGEGKETNRDESFYGDFVLAYDILLKVDHIYDAIRNYVTQKPYSKDKFKLYFQNPQFMGGWDKDKETDYRATILRYGSKYYLAIMDKKYAKCLQKIDKDDVNGNYEKINYKLLPGPNKMLPKVFFSKKWMAYYNPSEDIQKIYKNGTFKKGDMFNLNDCHKLIDFFKDSISRYPKWSNAYDFNFSETEKYKDIAGFYREVEEQGYKVSFESASKKEVDKLVEEGKLYMFQIYNKDFSDKSHGTPNLHTMYFKLLFDENNHGQIRLSGGAELFMRRASLKKEELVVHPANSPIANKNPDNPKKTTTLSYDVYKDKRFSEDQYELHIPIAINKCPKNIFKINTEVRVLLKHDDNPYVIGIARGERNLLYIVVVDGKGNIVEQYSLNEIINNFNGIRIKTDYHSLLDKKEKERFEARQNWTSIENIKELKAGYISQVVHKICELVEKYDAVIALEDLNSGFKNSRVKVEKQVYQKFEKMLIDKLNYMVDKKSNPCATGGALKGYQITNKFESFKSMSTQNGFIFYIPAWLTSKIDPSTGFVNLLKTKYTSIADSKKFISSFDRIMYVPEEDLFEFALDYKNFSRTDADYIKKWKLYSYGNRIRIFRNPKKNNVFDWEEVCLTSAYKELFNKYGINYQQGDIRALLCEQSDKAFYSSFMALMSLMLQMRNSITGRTDVDFLISPVKNSDGIFYDSRNYEAQENAILPKNADANGAYNIARKVLWAIGQFKKAEDEKLDKVKIAISNKEWLEYAQTSVKH

SEQ ID NO: 159 - protein, 1323 aa, synthetic construct
MSKLEKFTNCYSLSKTLRFKAIPVGKTQENIDNKRLLVEDEKRAEDYKGVKKLLDRYYLSFINDVLHSIKLKNLNNYISLFRKKTRTEKENKELENLEINLRKEIAKAFKGNEGYKSLFKKDIIETILPEFLDDKDEIALVNSFNGFTTAFTGFFDNRENMFSEEAKSTSIAFRCINENLTRYISNMDIFEKVDAIFDKHEVQEIKEKILNSDYDVEDFFEGEFFNFVLTQEGIDVYNAIIGGFVTESGGSSGMKSKISEYTEKEFLEFVKDIYTNNKKKFPTEESHIQAVLEFKKLTEHPSGSDLLYYPNENREDSPAGVVKEVKEWRASKGLPGFKAGGSSGEKIKGLNEYINLYNQKTKQKLPKFKPLYKQVLSDRESLSFYGEGYTSDEEVLEVFRNTLNKNSEIFSSIKKLEKLFKNFDEYSSAGIFVKNGPAISTISKDIFGEWNVIRDKWNAEYDDIHLKKKAVVTEKYEDDRRKSFKKIGSFSLEQLQEYADADLSVVEKLKEIIIQKVDEIYKVYGSSEKLFDADFVLEKSLKKNDAVVAIMKDLLDSVKSFENYIKAFFGEGKETNRDESFYGDFVLAYDILLKVDHIYDAIRNYVTQKPYSKDKFKLYFQNPQFMGGWDKDKETDYRATILRYGSKYYLAIMDKKYAKCLQKIDKDDVNGNYEKINYKLLPGPNKMLPKVFFSKKWMAYYNPSEDIQKIYKNGTFKKGDMFNLNDCHKLIDFFKDSISRYPKWSNAYDFNFSETEKYKDIAGFYREVEEQGYKVSFESASKKEVDKLVEEGKLYMFQIYNKDFSDKSHGTPNLHTMYFKLLFDENNHGQIRLSGGAELFMRRASLKKEELVVHPANSPIANKNPDNPKKTTTLSYDVYKDKRFSEDQYELHIPIAINKCPKNIFKINTEVRVLLKHDDNPYVIGIARGERNLLYIVVVDGKGNIVEQYSLNEIINNFNGIRIKTDYHSLLDKKEKERFEARQNWTSIENIKELKAGYISQVVHKICELVEKYDAVIALEDLNSGFKNSRVKVEKQVYQKFEKMLIDKLNYMVDKKSNPCATGGALKGYQITNKFESFKSMSTQNGFIFYIPAWLTSKIDPSTGFVNLLKTKYTSIADSKKFISSFDRIMYVPEEDLFEFALDYKNFSRTDADYIKKWKLYSYGNRIRIFRNPKKNNVFDWEEVCLTSAYKELFNKYGINYQQGDIRALLCEQSDKAFYSSFMALMSLMLQMRNSITGRTDVDFLISPVKNSDGIFYDSRNYEAQENAILPKNADANGAYNIARKVLWAIGQFKKAEDEKLDKVKIAISNKEWLEYAQTSVKH

SEQ ID NO: 160 - protein, 1511 aa, synthetic construct
MSKLEKFTNCYSLSKTLRFKAIPVGKTQENIDNKRLLVEDEKRAEDYKGVKKLLDRYYLSFINDVLHSIKLKNLNNYISLFRKKTRTEKENKELENLEINLRKEIAKAFKGNEGYKSLFKKDIIETILPEFLDDKDEIALVNSFNGFTTAFTGFFDNRENMFSEEAKSTSIAFRCINENLTRYISNMDIFEKVDAIFDKHEVQEIKEKILNSDYDVEDFFEGEFFNFVLTQEGIDVYNAIIGGFVTESGGSSGWRRRREDARAAPGLLGRLPVLPVAAAAELPPVPGGPRGPGELAKYGLPGLAQLKSRESYVLCYDPRTRGALWVVEQLRPERLRGDGDRRECDFREDDSVHAYHRATNADYRGSGFDRGHLAAAANHRWSQKAMDDTFYLSNVAPQVPHLNQNAWNNLEKYSRSLTRSYQNVYVCTGPLFLPRTEADGKSYVKYQVIGKNHVAVPTHFFKVLILEAAGGQIELRTYVMPNAPVDEAIPLERFLVPIESIERASGLLFVPNILARAGSLKAITAGSKGSSGEKIKGLNEYINLYNQKTKQKLPKFKPLYKQVLSDRESLSFYGEGYTSDEEVLEVFRNTLNKNSEIFSSIKKLEKLFKNFDEYSSAGIFVKNGPAISTISKDIFGEWNVIRDKWNAEYDDIHLKKKAVVTEKYEDDRRKSFKKIGSFSLEQLQEYADADLSVVEKLKEIIIQKVDEIYKVYGSSEKLFDADFVLEKSLKKNDAVVAIMKDLLDSVKSFENYIKAFFGEGKETNRDESFYGDFVLAYDILLKVDHIYDAIRNYVTQKPYSKDKFKLYFQNPQFMGGWDKDKETDYRATILRYGSKYYLAIMDKKYAKCLQKIDKDDVNGNYEKINYKLLPGPNKMLPKVFFSKKWMAYYNPSEDIQKIYKNGTFKKGDMFNLNDCHKLIDFFKDSISRYPKWSNAYDFNFSETEKYKDIAGFYREVEEQGYKVSFESASKKEVDKLVEEGKLYMFQIYNKDFSDKSHGTPNLHTMYFKLLFDENNHGQIRLSGGAELFMRRASLKKEELVVHPANSPIANKNPDNPKKTTTLSYDVYKDKRFSEDQYELHIPIAINKCPKNIFKINTEVRVLLKHDDNPYVIGIARGERNLLYIVVVDGKGNIVEQYSLNEIINNFNGIRIKTDYHSLLDKKEKERFEARQNWTSIENIKELKAGYISQVVHKICELVEKYDAVIALEDLNSGFKNSRVKVEKQVYQKFEKMLIDKLNYMVDKKSNPCATGGALKGYQITNKFESFKSMSTQNGFIFYIPAWLTSKIDPSTGFVNLLKTKYTSIADSKKFISSFDRIMYVPEEDLFEFALDYKNFSRTDADYIKKWKLYSYGNRIRIFRNPKKNNVFDWEEVCLTSAYKELFNKYGINYQQGDIRALLCEQSDKAFYSSFMALMSLMLQMRNSITGRTDVDFLISPVKNSDGIFYDSRNYEAQENAILPKNADANGAYNIARKVLWAIGQFKKAEDEKLDKVKIAISNKEWLEYAQTSVKH

SEQ ID NO: 161 - protein, 1372 aa, synthetic construct
MSKLEKFTNCYSLSKTLRFKAIPVGKTQENIDNKRLLVEDEKRAEDYKGVKKLLDRYYLSFINDVLHSIKLKNLNNYISLFRKKTRTEKENKELENLEINLRKEIAKAFKGNEGYKSLFKKDIIETILPEFLDDKDEIALVNSFNGFTTAFTGFFDNRENMFSEEAKSTSIAFRCINENLTRYISNMDIFEKVDAIFDKHEVQEIKEKILNSDYDVEDFFEGEFFNFVLTQEGIDVYNAIIGGFVTESGGSSGDEPGVATGNGQPVTGNWLAGASQGDGVPIPSQIADQLRGKEFKSWRDFREQFWMAVSKDPSALENLSPSNRYFVSQGLAPYAVPEEHLGSKEKFEIHHVVPLESGGALYNIDNLVIVTPKRHSEIHKELKLKRKEKGSSGEKIKGLNEYINLYNQKTKQKLPKFKPLYKQVLSDRESLSFYGEGYTSDEEVLEVFRNTLNKNSEIFSSIKKLEKLFKNFDEYSSAGIFVKNGPAISTISKDIFGEWNVIRDKWNAEYDDIHLKKKAVVTEKYEDDRRKSFKKIGSFSLEQLQEYADADLSVVEKLKEIIIQKVDEIYKVYGSSEKLFDADFVLEKSLKKNDAVVAIMKDLLDSVKSFENYIKAFFGEGKETNRDESFYGDFVLAYDILLKVDHIYDAIRNYVTQKPYSKDKFKLYFQNPQFMGGWDKDKETDYRATILRYGSKYYLAIMDKKYAKCLQKIDKDDVNGNYEKINYKLLPGPNKMLPKVFFSKKWMAYYNPSEDIQKIYKNGTFKKGDMFNLNDCHKLIDFFKDSISRYPKWSNAYDFNFSETEKYKDIAGFYREVEEQGYKVSFESASKKEVDKLVEEGKLYMFQIYNKDFSDKSHGTPNLHTMYFKLLFDENNHGQIRLSGGAELFMRRASLKKEELVVHPANSPIANKNPDNPKKTTTLSYDVYKDKRFSEDQYELHIPIAINKCPKNIFKINTEVRVLLKHDDNPYVIGIARGERNLLYIVVVDGKGNIVEQYSLNEIINNFNGIRIKTDYHSLLDKKEKERFEARQNWTSIENIKELKAGYISQVVHKICELVEKYDAVIALEDLNSGFKNSRVKVEKQVYQKFEKMLIDKLNYMVDKKSNPCATGGALKGYQITNKFESFKSMSTQNGFIFYIPAWLTSKIDPSTGFVNLLKTKYTSIADSKKFISSFDRIMYVPEEDLFEFALDYKNFSRTDADYIKKWKLYSYGNRIRIFRNPKKNNVFDWEEVCLTSAYKELFNKYGINYQQGDIRALLCEQSDKAFYSSFMALMSLMLQMRNSITGRTDVDFLISPVKNSDGIFYDSRNYEAQENAILPKNADANGAYNIARKVLWAIGQFKKAEDEKLDKVKIAISNKEWLEYAQTSVKH

SEQ ID NO: 162 - protein, 1373 aa, synthetic construct
MGSKLEKFTNCYSLSKTLRFKAIPVGKTQENIDNKRLLVEDEKRAEDYKGVKKLLDRYYLSFINDVLHSIKLKNLNNYISLFRKKTRTEKENKELENLEINLRKEIAKAFKGNEGYKSLFKKDIIETILPEFLDDKDEIALVNSFNGFTTAFTGFFDNRENMFSEEAKSTSIAFRCINENLTRYISNMDIFEKVDAIFDKHEVQEIKEKILNSDYDVEDFFEGEFFNFVLTQEGIDVYNAIIGGFVTESGEKIKGLNEYINLYNQKTKQKLPKFKPLYKQVLSDRESLSFYGENQTTQKGQKNSRERMKRIEEGIKELGSQILKEHPVENTQLQNEKLYLYYLQNGRDMYVDQELDINRLSDYDVDHIVPQSFLKDDSIDNKVLTRSDKNRGKSDNVPSEEVVKKMKNYWRQLLNAKLITQRKFDNLTKAERGGLSEGYTSDEEVLEVFRNTLNKNSEIFSSIKKLEKLFKNFDEYSSAGIFVKNGPAISTISKDIFGEWNVIRDKWNAEYDDIHLKKKAVVTEKYEDDRRKSFKKIGSFSLEQLQEYADADLSVVEKLKEIIIQKVDEIYKVYGSSEKLFDADFVLEKSLKKNDAVVAIMKDLLDSVKSFENYIKAFFGEGKETNRDESFYGDFVLAYDILLKVDHIYDAIRNYVTQKPYSKDKFKLYFQNPQFMGGWDKDKETDYRATILRYGSKYYLAIMDKKYAKCLQKIDKDDVNGNYEKINYKLLPGPNKMLPKVFFSKKWMAYYNPSEDIQKIYKNGTFKKGDMFNLNDCHKLIDFFKDSISRYPKWSNAYDFNFSETEKYKDIAGFYREVEEQGYKVSFESASKKEVDKLVEEGKLYMFQIYNKDFSDKSHGTPNLHTMYFKLLFDENNHGQIRLSGGAELFMRRASLKKEELVVHPANSPIANKNPDNPKKTTTLSYDVYKDKRFSEDQYELHIPIAINKCPKNIFKINTEVRVLLKHDDNPYVIGIARGERNLLYIVVVDGKGNIVEQYSLNEIINNFNGIRIKTDYHSLLDKKEKERFEARQNWTSIENIKELKAGYISQVVHKICELVEKYDAVIALEDLNSGFKNSRVKVEKQVYQKFEKMLIDKLNYMVDKKSNPCATGGALKGYQITNKFESFKSMSTQNGFIFYIPAWLTSKIDPSTGFVNLLKTKYTSIADSKKFISSFDRIMYVPEEDLFEFALDYKNFSRTDADYIKKWKLYSYGNRIRIFRNPKKNNVFDWEEVCLTSAYKELFNKYGINYQQGDIRALLCEQSDKAFYSSFMALMSLMLQMRNSITGRTDVDFLISPVKNSDGIFYDSRNYEAQENAILPKNADANGAYNIARKVLWAIGQFKKAEDEKLDKVKIAISNKEWLEYAQTSVKH

SEQ ID NO: 163 - protein, 1375 aa, synthetic construct
MGSKLEKFTNCYSLSKTLRFKAIPVGKTQENIDNKRLLVEDEKRAEDYKGVKKLLDRYYLSFINDVLHSIKLKNLNNYISLFRKKTRTEKENKELENLEINLRKEIAKAFKGNEGYKSLFKKDIIETILPEFLDDKDEIALVNSFNGFTTAFTGFFDNRENMFSEEAKSTSIAFRCINENLTRYISNMDIFEKVDAIFDKHEVQEIKEKILNSDYDVEDFFEGEFFNFVLTQEGIDVYNAIIGGFVTESGEKIKGLNEYINLYNQKTKQKLPKFKPLYKQVLSDRESLSFYGSGENQTTQKGQKNSRERMKRIEEGIKELGSQILKEHPVENTQLQNEKLYLYYLQNGRDMYVDQELDINRLSDYDVDHIVPQSFLKDDSIDNKVLTRSDKNRGKSDNVPSEEVVKKMKNYWRQLLNAKLITQRKFDNLTKAERGGLSEGYTSDEEVLEVFRNTLNKNSEIFSSIKKLEKLFKNFDEYSSAGIFVKNGPAISTISKDIFGEWNVIRDKWNAEYDDIHLKKKAVVTEKYEDDRRKSFKKIGSFSLEQLQEYADADLSVVEKLKEIIIQKVDEIYKVYGSSEKLFDADFVLEKSLKKNDAVVAIMKDLLDSVKSFENYIKAFFGEGKETNRDESFYGDFVLAYDILLKVDHIYDAIRNYVTQKPYSKDKFKLYFQNPQFMGGWDKDKETDYRATILRYGSKYYLAIMDKKYAKCLQKIDKDDVNGNYEKINYKLLPGPNKMLPKVFFSKKWMAYYNPSEDIQKIYKNGTFKKGDMFNLNDCHKLIDFFKDSISRYPKWSNAYDFNFSETEKYKDIAGFYREVEEQGYKVSFESASKKEVDKLVEEGKLYMFQIYNKDFSDKSHGTPNLHTMYFKLLFDENNHGQIRLSGGAELFMRRASLKKEELVVHPANSPIANKNPDNPKKTTTLSYDVYKDKRFSEDQYELHIPIAINKCPKNIFKINTEVRVLLKHDDNPYVIGIARGERNLLYIVVVDGKGNIVEQYSLNEIINNFNGIRIKTDYHSLLDKKEKERFEARQNWTSIENIKELKAGYISQVVHKICELVEKYDAVIALEDLNSGFKNSRVKVEKQVYQKFEKMLIDKLNYMVDKKSNPCATGGALKGYQITNKFESFKSMSTQNGFIFYIPAWLTSKIDPSTGFVNLLKTKYTSIADSKKFISSFDRIMYVPEEDLFEFALDYKNFSRTDADYIKKWKLYSYGNRIRIFRNPKKNNVFDWEEVCLTSAYKELFNKYGINYQQGDIRALLCEQSDKAFYSSFMALMSLMLQMRNSITGRTDVDFLISPVKNSDGIFYDSRNYEAQENAILPKNADANGAYNIARKVLWAIGQFKKAEDEKLDKVKIAISNKEWLEYAQTSVKH

SEQ ID NO: 164 - protein, 1377 aa, synthetic construct
MGSKLEKFTNCYSLSKTLRFKAIPVGKTQENIDNKRLLVEDEKRAEDYKGVKKLLDRYYLSFINDVLHSIKLKNLNNYISLFRKKTRTEKENKELENLEINLRKEIAKAFKGNEGYKSLFKKDIIETILPEFLDDKDEIALVNSFNGFTTAFTGFFDNRENMFSEEAKSTSIAFRCINENLTRYISNMDIFEKVDAIFDKHEVQEIKEKILNSDYDVEDFFEGEFFNFVLTQEGIDVYNAIIGGFVTESGEKIKGLNEYINLYNQKTKQKLPKFKPLYKQVLSDRESLSFYGGSSGENQTTQKGQKNSRERMKRIEEGIKELGSQILKEHPVENTQLQNEKLYLYYLQNGRDMYVDQELDINRLSDYDVDHIVPQSFLKDDSIDNKVLTRSDKNRGKSDNVPSEEVVKKMKNYWRQLLNAKLITQRKFDNLTKAERGGLSEGYTSDEEVLEVFRNTLNKNSEIFSSIKKLEKLFKNFDEYSSAGIFVKNGPAISTISKDIFGEWNVIRDKWNAEYDDIHLKKKAVVTEKYEDDRRKSFKKIGSFSLEQLQEYADADLSVVEKLKEIIIQKVDEIYKVYGSSEKLFDADFVLEKSLKKNDAVVAIMKDLLDSVKSFENYIKAFFGEGKETNRDESFYGDFVLAYDILLKVDHIYDAIRNYVTQKPYSKDKFKLYFQNPQFMGGWDKDKETDYRATILRYGSKYYLAIMDKKYAKCLQKIDKDDVNGNYEKINYKLLPGPNKMLPKVFFSKKWMAYYNPSEDIQKIYKNGTFKKGDMFNLNDCHKLIDFFKDSISRYPKWSNAYDFNFSETEKYKDIAGFYREVEEQGYKVSFESASKKEVDKLVEEGKLYMFQIYNKDFSDKSHGTPNLHTMYFKLLFDENNHGQIRLSGGAELFMRRASLKKEELVVHPANSPIANKNPDNPKKTTTLSYDVYKDKRFSEDQYELHIPIAINKCPKNIFKINTEVRVLLKHDDNPYVIGIARGERNLLYIVVVDGKGNIVEQYSLNEIINNFNGIRIKTDYHSLLDKKEKERFEARQNWTSIENIKELKAGYISQVVHKICELVEKYDAVIALEDLNSGFKNSRVKVEKQVYQKFEKMLIDKLNYMVDKKSNPCATGGALKGYQITNKFESFKSMSTQNGFIFYIPAWLTSKIDPSTGFVNLLKTKYTSIADSKKFISSFDRIMYVPEEDLFEFALDYKNFSRTDADYIKKWKLYSYGNRIRIFRNPKKNNVFDWEEVCLTSAYKELFNKYGINYQQGDIRALLCEQSDKAFYSSFMALMSLMLQMRNSITGRTDVDFLISPVKNSDGIFYDSRNYEAQENAILPKNADANGAYNIARKVLWAIGQFKKAEDEKLDKVKIAISNKEWLEYAQTSVKH

SEQ ID NO: 165 - protein, 1379 aa, synthetic construct
MGSKLEKFTNCYSLSKTLRFKAIPVGKTQENIDNKRLLVEDEKRAEDYKGVKKLLDRYYLSFINDVLHSIKLKNLNNYISLFRKKTRTEKENKELENLEINLRKEIAKAFKGNEGYKSLFKKDIIETILPEFLDDKDEIALVNSFNGFTTAFTGFFDNRENMFSEEAKSTSIAFRCINENLTRYISNMDIFEKVDAIFDKHEVQEIKEKILNSDYDVEDFFEGEFFNFVLTQEGIDVYNAIIGGFVTESGEKIKGLNEYINLYNQKTKQKLPKFKPLYKQVLSDRESLSFYGGSSGENQTTQKGQKNSRERMKRIEEGIKELGSQILKEHPVENTQLQNEKLYLYYLQNGRDMYVDQELDINRLSDYDVDHIVPQSFLKDDSIDNKVLTRSDKNRGKSDNVPSEEVVKKMKNYWRQLLNAKLITQRKFDNLTKAERGGLSGSEGYTSDEEVLEVFRNTLNKNSEIFSSIKKLEKLFKNFDEYSSAGIFVKNGPAISTISKDIFGEWNVIRDKWNAEYDDIHLKKKAVVTEKYEDDRRKSFKKIGSFSLEQLQEYADADLSVVEKLKEIIIQKVDEIYKVYGSSEKLFDADFVLEKSLKKNDAVVAIMKDLLDSVKSFENYIKAFFGEGKETNRDESFYGDFVLAYDILLKVDHIYDAIRNYVTQKPYSKDKFKLYFQNPQFMGGWDKDKETDYRATILRYGSKYYLAIMDKKYAKCLQKIDKDDVNGNYEKINYKLLPGPNKMLPKVFFSKKWMAYYNPSEDIQKIYKNGTFKKGDMFNLNDCHKLIDFFKDSISRYPKWSNAYDFNFSETEKYKDIAGFYREVEEQGYKVSFESASKKEVDKLVEEGKLYMFQIYNKDFSDKSHGTPNLHTMYFKLLFDENNHGQIRLSGGAELFMRRASLKKEELVVHPANSPIANKNPDNPKKTTTLSYDVYKDKRFSEDQYELHIPIAINKCPKNIFKINTEVRVLLKHDDNPYVIGIARGERNLLYIVVVDGKGNIVEQYSLNEIINNFNGIRIKTDYHSLLDKKEKERFEARQNWTSIENIKELKAGYISQVVHKICELVEKYDAVIALEDLNSGFKNSRVKVEKQVYQKFEKMLIDKLNYMVDKKSNPCATGGALKGYQITNKFESFKSMSTQNGFIFYIPAWLTSKIDPSTGFVNLLKTKYTSIADSKKFISSFDRIMYVPEEDLFEFALDYKNFSRTDADYIKKWKLYSYGNRIRIFRNPKKNNVFDWEEVCLTSAYKELFNKYGINYQQGDIRALLCEQSDKAFYSSFMALMSLMLQMRNSITGRTDVDFLISPVKNSDGIFYDSRNYEAQENAILPKNADANGAYNIARKVLWAIGQFKKAEDEKLDKVKIAISNKEWLEYAQTSVKH

SEQ ID NO: 166 - protein, 1373 aa, synthetic construct
MGSKLEKFTNCYSLSKTLRFKAIPVGKTQENIDNKRLLVEDEKRAEDYKGVKKLLDRYYLSFINDVLHSIKLKNLNNYISLFRKKTRTEKENKELENLEINLRKEIAKAFKGNEGYKSLFKKDIIETILPEFLDDKDEIALVNSFNGFTTAFTGFFDNRENMFSEEAKSTSIAFRCINENLTRYISNMDIFEKVDAIFDKHEVQEIKEKILNSDYDVEDFFEGEFFNFVLTQEGIDVYNAIIGGFVTESGEKIKGLNEYINLYNQKTKQKLPKFKPLYKQVLSDRESLSFYGEENQTTQKGQKNSRERMKRIEEGIKELGSQILKEHPVENTQLQNEKLYLYYLQNGRDMYVDQELDINRLSDYDVDHIVPQSFLKDDSIDNKVLTRSDKNRGKSDNVPSEEVVKKMKNYWRQLLNAKLITQRKFDNLTKAERGGLSGYTSDEEVLEVFRNTLNKNSEIFSSIKKLEKLFKNFDEYSSAGIFVKNGPAISTISKDIFGEWNVIRDKWNAEYDDIHLKKKAVVTEKYEDDRRKSFKKIGSFSLEQLQEYADADLSVVEKLKEIIIQKVDEIYKVYGSSEKLFDADFVLEKSLKKNDAVVAIMKDLLDSVKSFENYIKAFFGEGKETNRDESFYGDFVLAYDILLKVDHIYDAIRNYVTQKPYSKDKFKLYFQNPQFMGGWDKDKETDYRATILRYGSKYYLAIMDKKYAKCLQKIDKDDVNGNYEKINYKLLPGPNKMLPKVFFSKKWMAYYNPSEDIQKIYKNGTFKKGDMFNLNDCHKLIDFFKDSISRYPKWSNAYDFNFSETEKYKDIAGFYREVEEQGYKVSFESASKKEVDKLVEEGKLYMFQIYNKDFSDKSHGTPNLHTMYFKLLFDENNHGQIRLSGGAELFMRRASLKKEELVVHPANSPIANKNPDNPKKTTTLSYDVYKDKRFSEDQYELHIPIAINKCPKNIFKINTEVRVLLKHDDNPYVIGIARGERNLLYIVVVDGKGNIVEQYSLNEIINNFNGIRIKTDYHSLLDKKEKERFEARQNWTSIENIKELKAGYISQVVHKICELVEKYDAVIALEDLNSGFKNSRVKVEKQVYQKFEKMLIDKLNYMVDKKSNPCATGGALKGYQITNKFESFKSMSTQNGFIFYIPAWLTSKIDPSTGFVNLLKTKYTSIADSKKFISSFDRIMYVPEEDLFEFALDYKNFSRTDADYIKKWKLYSYGNRIRIFRNPKKNNVFDWEEVCLTSAYKELFNKYGINYQQGDIRALLCEQSDKAFYSSFMALMSLMLQMRNSITGRTDVDFLISPVKNSDGIFYDSRNYEAQENAILPKNADANGAYNIARKVLWAIGQFKKAEDEKLDKVKIAISNKEWLEYAQTSVKH

SEQ ID NO: 167 - protein, 1375 aa, synthetic construct
MGSKLEKFTNCYSLSKTLRFKAIPVGKTQENIDNKRLLVEDEKRAEDYKGVKKLLDRYYLSFINDVLHSIKLKNLNNYISLFRKKTRTEKENKELENLEINLRKEIAKAFKGNEGYKSLFKKDIIETILPEFLDDKDEIALVNSFNGFTTAFTGFFDNRENMFSEEAKSTSIAFRCINENLTRYISNMDIFEKVDAIFDKHEVQEIKEKILNSDYDVEDFFEGEFFNFVLTQEGIDVYNAIIGGFVTESGEKIKGLNEYINLYNQKTKQKLPKFKPLYKQVLSDRESLSFYGEGSENQTTQKGQKNSRERMKRIEEGIKELGSQILKEHPVENTQLQNEKLYLYYLQNGRDMYVDQELDINRLSDYDVDHIVPQSFLKDDSIDNKVLTRSDKNRGKSDNVPSEEVVKKMKNYWRQLLNAKLITQRKFDNLTKAERGGLSGYTSDEEVLEVFRNTLNKNSEIFSSIKKLEKLFKNFDEYSSAGIFVKNGPAISTISKDIFGEWNVIRDKWNAEYDDIHLKKKAVVTEKYEDDRRKSFKKIGSFSLEQLQEYADADLSVVEKLKEIIIQKVDEIYKVYGSSEKLFDADFVLEKSLKKNDAVVAIMKDLLDSVKSFENYIKAFFGEGKETNRDESFYGDFVLAYDILLKVDHIYDAIRNYVTQKPYSKDKFKLYFQNPQFMGGWDKDKETDYRATILRYGSKYYLAIMDKKYAKCLQKIDKDDVNGNYEKINYKLLPGPNKMLPKVFFSKKWMAYYNPSEDIQKIYKNGTFKKGDMFNLNDCHKLIDFFKDSISRYPKWSNAYDFNFSETEKYKDIAGFYREVEEQGYKVSFESASKKEVDKLVEEGKLYMFQIYNKDFSDKSHGTPNLHTMYFKLLFDENNHGQIRLSGGAELFMRRASLKKEELVVHPANSPIANKNPDNPKKTTTLSYDVYKDKRFSEDQYELHIPIAINKCPKNIFKINTEVRVLLKHDDNPYVIGIARGERNLLYIVVVDGKGNIVEQYSLNEIINNFNGIRIKTDYHSLLDKKEKERFEARQNWTSIENIKELKAGYISQVVHKICELVEKYDAVIALEDLNSGFKNSRVKVEKQVYQKFEKMLIDKLNYMVDKKSNPCATGGALKGYQITNKFESFKSMSTQNGFIFYIPAWLTSKIDPSTGFVNLLKTKYTSIADSKKFISSFDRIMYVPEEDLFEFALDYKNFSRTDADYIKKWKLYSYGNRIRIFRNPKKNNVFDWEEVCLTSAYKELFNKYGINYQQGDIRALLCEQSDKAFYSSFMALMSLMLQMRNSITGRTDVDFLISPVKNSDGIFYDSRNYEAQENAILPKNADANGAYNIARKVLWAIGQFKKAEDEKLDKVKIAISNKEWLEYAQTSVKH

SEQ ID NO: 168 - protein, 1377 aa, synthetic construct
MGSKLEKFTNCYSLSKTLRFKAIPVGKTQENIDNKRLLVEDEKRAEDYKGVKKLLDRYYLSFINDVLHSIKLKNLNNYISLFRKKTRTEKENKELENLEINLRKEIAKAFKGNEGYKSLFKKDIIETILPEFLDDKDEIALVNSFNGFTTAFTGFFDNRENMFSEEAKSTSIAFRCINENLTRYISNMDIFEKVDAIFDKHEVQEIKEKILNSDYDVEDFFEGEFFNFVLTQEGIDVYNAIIGGFVTESGEKIKGLNEYINLYNQKTKQKLPKFKPLYKQVLSDRESLSFYGEGSSGENQTTQKGQKNSRERMKRIEEGIKELGSQILKEHPVENTQLQNEKLYLYYLQNGRDMYVDQELDINRLSDYDVDHIVPQSFLKDDSIDNKVLTRSDKNRGKSDNVPSEEVVKKMKNYWRQLLNAKLITQRKFDNLTKAERGGLSGYTSDEEVLEVFRNTLNKNSEIFSSIKKLEKLFKNFDEYSSAGIFVKNGPAISTISKDIFGEWNVIRDKWNAEYDDIHLKKKAVVTEKYEDDRRKSFKKIGSFSLEQLQEYADADLSVVEKLKEIIIQKVDEIYKVYGSSEKLFDADFVLEKSLKKNDAVVAIMKDLLDSVKSFENYIKAFFGEGKETNRDESFYGDFVLAYDILLKVDHIYDAIRNYVTQKPYSKDKFKLYFQNPQFMGGWDKDKETDYRATILRYGSKYYLAIMDKKYAKCLQKIDKDDVNGNYEKINYKLLPGPNKMLPKVFFSKKWMAYYNPSEDIQKIYKNGTFKKGDMFNLNDCHKLIDFFKDSISRYPKWSNAYDFNFSETEKYKDIAGFYREVEEQGYKVSFESASKKEVDKLVEEGKLYMFQIYNKDFSDKSHGTPNLHTMYFKLLFDENNHGQIRLSGGAELFMRRASLKKEELVVHPANSPIANKNPDNPKKTTTLSYDVYKDKRFSEDQYELHIPIAINKCPKNIFKINTEVRVLLKHDDNPYVIGIARGERNLLYIVVVDGKGNIVEQYSLNEIINNFNGIRIKTDYHSLLDKKEKERFEARQNWTSIENIKELKAGYISQVVHKICELVEKYDAVIALEDLNSGFKNSRVKVEKQVYQKFEKMLIDKLNYMVDKKSNPCATGGALKGYQITNKFESFKSMSTQNGFIFYIPAWLTSKIDPSTGFVNLLKTKYTSIADSKKFISSFDRIMYVPEEDLFEFALDYKNFSRTDADYIKKWKLYSYGNRIRIFRNPKKNNVFDWEEVCLTSAYKELFNKYGINYQQGDIRALLCEQSDKAFYSSFMALMSLMLQMRNSITGRTDVDFLISPVKNSDGIFYDSRNYEAQENAILPKNADANGAYNIARKVLWAIGQFKKAEDEKLDKVKIAISNKEWLEYAQTSVKH

SEQ ID NO: 169 - protein, 1379 aa, synthetic construct
MGSKLEKFTNCYSLSKTLRFKAIPVGKTQENIDNKRLLVEDEKRAEDYKGVKKLLDRYYLSFINDVLHSIKLKNLNNYISLFRKKTRTEKENKELENLEINLRKEIAKAFKGNEGYKSLFKKDIIETILPEFLDDKDEIALVNSFNGFTTAFTGFFDNRENMFSEEAKSTSIAFRCINENLTRYISNMDIFEKVDAIFDKHEVQEIKEKILNSDYDVEDFFEGEFFNFVLTQEGIDVYNAIIGGFVTESGEKIKGLNEYINLYNQKTKQKLPKFKPLYKQVLSDRESLSFYGEGSSGENQTTQKGQKNSRERMKRIEEGIKELGSQILKEHPVENTQLQNEKLYLYYLQNGRDMYVDQELDINRLSDYDVDHIVPQSFLKDDSIDNKVLTRSDKNRGKSDNVPSEEVVKKMKNYWRQLLNAKLITQRKFDNLTKAERGGLSGSGYTSDEEVLEVFRNTLNKNSEIFSSIKKLEKLFKNFDEYSSAGIFVKNGPAISTISKDIFGEWNVIRDKWNAEYDDIHLKKKAVVTEKYEDDRRKSFKKIGSFSLEQLQEYADADLSVVEKLKEIIIQKVDEIYKVYGSSEKLFDADFVLEKSLKKNDAVVAIMKDLLDSVKSFENYIKAFFGEGKETNRDESFYGDFVLAYDILLKVDHIYDAIRNYVTQKPYSKDKFKLYFQNPQFMGGWDKDKETDYRATILRYGSKYYLAIMDKKYAKCLQKIDKDDVNGNYEKINYKLLPGPNKMLPKVFFSKKWMAYYNPSEDIQKIYKNGTFKKGDMFNLNDCHKLIDFFKDSISRYPKWSNAYDFNFSETEKYKDIAGFYREVEEQGYKVSFESASKKEVDKLVEEGKLYMFQIYNKDFSDKSHGTPNLHTMYFKLLFDENNHGQIRLSGGAELFMRRASLKKEELVVHPANSPIANKNPDNPKKTTTLSYDVYKDKRFSEDQYELHIPIAINKCPKNIFKINTEVRVLLKHDDNPYVIGIARGERNLLYIVVVDGKGNIVEQYSLNEIINNFNGIRIKTDYHSLLDKKEKERFEARQNWTSIENIKELKAGYISQVVHKICELVEKYDAVIALEDLNSGFKNSRVKVEKQVYQKFEKMLIDKLNYMVDKKSNPCATGGALKGYQITNKFESFKSMSTQNGFIFYIPAWLTSKIDPSTGFVNLLKTKYTSIADSKKFISSFDRIMYVPEEDLFEFALDYKNFSRTDADYIKKWKLYSYGNRIRIFRNPKKNNVFDWEEVCLTSAYKELFNKYGINYQQGDIRALLCEQSDKAFYSSFMALMSLMLQMRNSITGRTDVDFLISPVKNSDGIFYDSRNYEAQENAILPKNADANGAYNIARKVLWAIGQFKKAEDEKLDKVKIAISNKEWLEYAQTSVKH

SEQ ID NO: 170 - protein, 1373 aa, synthetic construct
MGSKLEKFTNCYSLSKTLRFKAIPVGKTQENIDNKRLLVEDEKRAEDYKGVKKLLDRYYLSFINDVLHSIKLKNLNNYISLFRKKTRTEKENKELENLEINLRKEIAKAFKGNEGYKSLFKKDIIETILPEFLDDKDEIALVNSFNGFTTAFTGFFDNRENMFSEEAKSTSIAFRCINENLTRYISNMDIFEKVDAIFDKHEVQEIKEKILNSDYDVEDFFEGEFFNFVLTQEGIDVYNAIIGGFVTESGEKIKGLNEYINLYNQKTKQKLPKFKPLYKQVLSDRESLSFYGENQTTQKGQKNSRERMKRIEEGIKELGSQILKEHPVENTQLQNEKLYLYYLQNGRDMYVDQELDINRLSDYDVDHIVPQSFLKDDSIDNKVLTRSDKNRGKSDNVPSEEVVKKMKNYWRQLLNAKLITQRKFDNLTKAERGGLSEGYTSDEEVLEVFRNTLNKNSEIFSSIKKLEKLFKNFDEYSSAGIFVKNGPAISTISKDIFGEWNVIRDKWNAEYDDIHLKKKAVVTEKYEDDRRKSFKKIGSFSLEQLQEYADADLSVVEKLKEIIIQKVDEIYKVYGSSEKLFDADFVLEKSLKKNDAVVAIMKDLLDSVKSFENYIKAFFGEGKETNRDESFYGDFVLAYDILLKVDHIYDAIRNYVTQKPYSKDKFKLYFQNPQFMGGWDKDKETDYRATILRYGSKYYLAIMDKKYAKCLQKIDKDDVNGNYEKINYKLLPGPNKMLPKVFFSKKWMAYYNPSEDIQKIYKNGTFKKGDMFNLNDCHKLIDFFKDSISRYPKWSNAYDFNFSETEKYKDIAGFYREVEEQGYKVSFESASKKEVDKLVEEGKLYMFQIYNKDFSDKSHGTPNLHTMYFKLLFDENNHGQIRLSGGAELFMRRASLKKEELVVHPANSPIANKNPDNPKKTTTLSYDVYKDKRFSEDQYELHIPIAINKCPKNIFKINTEVRVLLKHDDNPYVIGIDRGERNLLYIVVVDGKGNIVEQYSLNEIINNFNGIRIKTDYHSLLDKKEKERFEARQNWTSIENIKELKAGYISQVVHKICELVEKYDAVIALEDLNSGFKNSRVKVEKQVYQKFEKMLIDKLNYMVDKKSNPCATGGALKGYQITNKFESFKSMSTQNGFIFYIPAWLTSKIDPSTGFVNLLKTKYTSIADSKKFISSFDRIMYVPEEDLFEFALDYKNFSRTDADYIKKWKLYSYGNRIRIFRNPKKNNVFDWEEVCLTSAYKELFNKYGINYQQGDIRALLCEQSDKAFYSSFMALMSLMLQMRNSITGRTDVDFLISPVKNSDGIFYDSRNYEAQENAILPKNADANGAYNIARKVLWAIGQFKKAEDEKLDKVKIAISNKEWLEYAQTSVKH

SEQ ID NO: 171 - protein, 1375 aa, synthetic construct
MGSKLEKFTNCYSLSKTLRFKAIPVGKTQENIDNKRLLVEDEKRAEDYKGVKKLLDRYYLSFINDVLHSIKLKNLNNYISLFRKKTRTEKENKELENLEINLRKEIAKAFKGNEGYKSLFKKDIIETILPEFLDDKDEIALVNSFNGFTTAFTGFFDNRENMFSEEAKSTSIAFRCINENLTRYISNMDIFEKVDAIFDKHEVQEIKEKILNSDYDVEDFFEGEFFNFVLTQEGIDVYNAIIGGFVTESGEKIKGLNEYINLYNQKTKQKLPKFKPLYKQVLSDRESLSFYGSGENQTTQKGQKNSRERMKRIEEGIKELGSQILKEHPVENTQLQNEKLYLYYLQNGRDMYVDQELDINRLSDYDVDHIVPQSFLKDDSIDNKVLTRSDKNRGKSDNVPSEEVVKKMKNYWRQLLNAKLITQRKFDNLTKAERGGLSEGYTSDEEVLEVFRNTLNKNSEIFSSIKKLEKLFKNFDEYSSAGIFVKNGPAISTISKDIFGEWNVIRDKWNAEYDDIHLKKKAVVTEKYEDDRRKSFKKIGSFSLEQLQEYADADLSVVEKLKEIIIQKVDEIYKVYGSSEKLFDADFVLEKSLKKNDAVVAIMKDLLDSVKSFENYIKAFFGEGKETNRDESFYGDFVLAYDILLKVDHIYDAIRNYVTQKPYSKDKFKLYFQNPQFMGGWDKDKETDYRATILRYGSKYYLAIMDKKYAKCLQKIDKDDVNGNYEKINYKLLPGPNKMLPKVFFSKKWMAYYNPSEDIQKIYKNGTFKKGDMFNLNDCHKLIDFFKDSISRYPKWSNAYDFNFSETEKYKDIAGFYREVEEQGYKVSFESASKKEVDKLVEEGKLYMFQIYNKDFSDKSHGTPNLHTMYFKLLFDENNHGQIRLSGGAELFMRRASLKKEELVVHPANSPIANKNPDNPKKTTTLSYDVYKDKRFSEDQYELHIPIAINKCPKNIFKINTEVRVLLKHDDNPYVIGIDRGERNLLYIVVVDGKGNIVEQYSLNEIINNFNGIRIKTDYHSLLDKKEKERFEARQNWTSIENIKELKAGYISQVVHKICELVEKYDAVIALEDLNSGFKNSRVKVEKQVYQKFEKMLIDKLNYMVDKKSNPCATGGALKGYQITNKFESFKSMSTQNGFIFYIPAWLTSKIDPSTGFVNLLKTKYTSIADSKKFISSFDRIMYVPEEDLFEFALDYKNFSRTDADYIKKWKLYSYGNRIRIFRNPKKNNVFDWEEVCLTSAYKELFNKYGINYQQGDIRALLCEQSDKAFYSSFMALMSLMLQMRNSITGRTDVDFLISPVKNSDGIFYDSRNYEAQENAILPKNADANGAYNIARKVLWAIGQFKKAEDEKLDKVKIAISNKEWLEYAQTSVKH

SEQ ID NO: 172 - protein, 1377 aa, synthetic construct
MGSKLEKFTNCYSLSKTLRFKAIPVGKTQENIDNKRLLVEDEKRAEDYKGVKKLLDRYYLSFINDVLHSIKLKNLNNYISLFRKKTRTEKENKELENLEINLRKEIAKAFKGNEGYKSLFKKDIIETILPEFLDDKDEIALVNSFNGFTTAFTGFFDNRENMFSEEAKSTSIAFRCINENLTRYISNMDIFEKVDAIFDKHEVQEIKEKILNSDYDVEDFFEGEFFNFVLTQEGIDVYNAIIGGFVTESGEKIKGLNEYINLYNQKTKQKLPKFKPLYKQVLSDRESLSFYGGSSGENQTTQKGQKNSRERMKRIEEGIKELGSQILKEHPVENTQLQNEKLYLYYLQNGRDMYVDQELDINRLSDYDVDHIVPQSFLKDDSIDNKVLTRSDKNRGKSDNVPSEEVVKKMKNYWRQLLNAKLITQRKFDNLTKAERGGLSEGYTSDEEVLEVFRNTLNKNSEIFSSIKKLEKLFKNFDEYSSAGIFVKNGPAISTISKDIFGEWNVIRDKWNAEYDDIHLKKKAVVTEKYEDDRRKSFKKIGSFSLEQLQEYADADLSVVEKLKEIIIQKVDEIYKVYGSSEKLFDADFVLEKSLKKNDAVVAIMKDLLDSVKSFENYIKAFFGEGKETNRDESFYGDFVLAYDILLKVDHIYDAIRNYVTQKPYSKDKFKLYFQNPQFMGGWDKDKETDYRATILRYGSKYYLAIMDKKYAKCLQKIDKDDVNGNYEKINYKLLPGPNKMLPKVFFSKKWMAYYNPSEDIQKIYKNGTFKKGDMFNLNDCHKLIDFFKDSISRYPKWSNAYDFNFSETEKYKDIAGFYREVEEQGYKVSFESASKKEVDKLVEEGKLYMFQIYNKDFSDKSHGTPNLHTMYFKLLFDENNHGQIRLSGGAELFMRRASLKKEELVVHPANSPIANKNPDNPKKTTTLSYDVYKDKRFSEDQYELHIPIAINKCPKNIFKINTEVRVLLKHDDNPYVIGIDRGERNLLYIVVVDGKGNIVEQYSLNEIINNFNGIRIKTDYHSLLDKKEKERFEARQNWTSIENIKELKAGYISQVVHKICELVEKYDAVIALEDLNSGFKNSRVKVEKQVYQKFEKMLIDKLNYMVDKKSNPCATGGALKGYQITNKFESFKSMSTQNGFIFYIPAWLTSKIDPSTGFVNLLKTKYTSIADSKKFISSFDRIMYVPEEDLFEFALDYKNFSRTDADYIKKWKLYSYGNRIRIFRNPKKNNVFDWEEVCLTSAYKELFNKYGINYQQGDIRALLCEQSDKAFYSSFMALMSLMLQMRNSITGRTDVDFLISPVKNSDGIFYDSRNYEAQENAILPKNADANGAYNIARKVLWAIGQFKKAEDEKLDKVKIAISNKEWLEYAQTSVKH

SEQ ID NO: 173 - protein, 1379 aa, synthetic construct
MGSKLEKFTNCYSLSKTLRFKAIPVGKTQENIDNKRLLVEDEKRAEDYKGVKKLLDRYYLSFINDVLHSIKLKNLNNYISLFRKKTRTEKENKELENLEINLRKEIAKAFKGNEGYKSLFKKDIIETILPEFLDDKDEIALVNSFNGFTTAFTGFFDNRENMFSEEAKSTSIAFRCINENLTRYISNMDIFEKVDAIFDKHEVQEIKEKILNSDYDVEDFFEGEFFNFVLTQEGIDVYNAIIGGFVTESGEKIKGLNEYINLYNQKTKQKLPKFKPLYKQVLSDRESLSFYGGSSGENQTTQKGQKNSRERMKRIEEGIKELGSQILKEHPVENTQLQNEKLYLYYLQNGRDMYVDQELDINRLSDYDVDHIVPQSFLKDDSIDNKVLTRSDKNRGKSDNVPSEEVVKKMKNYWRQLLNAKLITQRKFDNLTKAERGGLSGSEGYTSDEEVLEVFRNTLNKNSEIFSSIKKLEKLFKNFDEYSSAGIFVKNGPAISTISKDIFGEWNVIRDKWNAEYDDIHLKKKAVVTEKYEDDRRKSFKKIGSFSLEQLQEYADADLSVVEKLKEIIIQKVDEIYKVYGSSEKLFDADFVLEKSLKKNDAVVAIMKDLLDSVKSFENYIKAFFGEGKETNRDESFYGDFVLAYDILLKVDHIYDAIRNYVTQKPYSKDKFKLYFQNPQFMGGWDKDKETDYRATILRYGSKYYLAIMDKKYAKCLQKIDKDDVNGNYEKINYKLLPGPNKMLPKVFFSKKWMAYYNPSEDIQKIYKNGTFKKGDMFNLNDCHKLIDFFKDSISRYPKWSNAYDFNFSETEKYKDIAGFYREVEEQGYKVSFESASKKEVDKLVEEGKLYMFQIYNKDFSDKSHGTPNLHTMYFKLLFDENNHGQIRLSGGAELFMRRASLKKEELVVHPANSPIANKNPDNPKKTTTLSYDVYKDKRFSEDQYELHIPIAINKCPKNIFKINTEVRVLLKHDDNPYVIGIDRGERNLLYIVVVDGKGNIVEQYSLNEIINNFNGIRIKTDYHSLLDKKEKERFEARQNWTSIENIKELKAGYISQVVHKICELVEKYDAVIALEDLNSGFKNSRVKVEKQVYQKFEKMLIDKLNYMVDKKSNPCATGGALKGYQITNKFESFKSMSTQNGFIFYIPAWLTSKIDPSTGFVNLLKTKYTSIADSKKFISSFDRIMYVPEEDLFEFALDYKNFSRTDADYIKKWKLYSYGNRIRIFRNPKKNNVFDWEEVCLTSAYKELFNKYGINYQQGDIRALLCEQSDKAFYSSFMALMSLMLQMRNSITGRTDVDFLISPVKNSDGIFYDSRNYEAQENAILPKNADANGAYNIARKVLWAIGQFKKAEDEKLDKVKIAISNKEWLEYAQTSVKH

SEQ ID NO: 174 - protein, 1373 aa, synthetic construct
MGSKLEKFTNCYSLSKTLRFKAIPVGKTQENIDNKRLLVEDEKRAEDYKGVKKLLDRYYLSFINDVLHSIKLKNLNNYISLFRKKTRTEKENKELENLEINLRKEIAKAFKGNEGYKSLFKKDIIETILPEFLDDKDEIALVNSFNGFTTAFTGFFDNRENMFSEEAKSTSIAFRCINENLTRYISNMDIFEKVDAIFDKHEVQEIKEKILNSDYDVEDFFEGEFFNFVLTQEGIDVYNAIIGGFVTESGEKIKGLNEYINLYNQKTKQKLPKFKPLYKQVLSDRESLSFYGEENQTTQKGQKNSRERMKRIEEGIKELGSQILKEHPVENTQLQNEKLYLYYLQNGRDMYVDQELDINRLSDYDVDHIVPQSFLKDDSIDNKVLTRSDKNRGKSDNVPSEEVVKKMKNYWRQLLNAKLITQRKFDNLTKAERGGLSGYTSDEEVLEVFRNTLNKNSEIFSSIKKLEKLFKNFDEYSSAGIFVKNGPAISTISKDIFGEWNVIRDKWNAEYDDIHLKKKAVVTEKYEDDRRKSFKKIGSFSLEQLQEYADADLSVVEKLKEIIIQKVDEIYKVYGSSEKLFDADFVLEKSLKKNDAVVAIMKDLLDSVKSFENYIKAFFGEGKETNRDESFYGDFVLAYDILLKVDHIYDAIRNYVTQKPYSKDKFKLYFQNPQFMGGWDKDKETDYRATILRYGSKYYLAIMDKKYAKCLQKIDKDDVNGNYEKINYKLLPGPNKMLPKVFFSKKWMAYYNPSEDIQKIYKNGTFKKGDMFNLNDCHKLIDFFKDSISRYPKWSNAYDFNFSETEKYKDIAGFYREVEEQGYKVSFESASKKEVDKLVEEGKLYMFQIYNKDFSDKSHGTPNLHTMYFKLLFDENNHGQIRLSGGAELFMRRASLKKEELVVHPANSPIANKNPDNPKKTTTLSYDVYKDKRFSEDQYELHIPIAINKCPKNIFKINTEVRVLLKHDDNPYVIGIDRGERNLLYIVVVDGKGNIVEQYSLNEIINNFNGIRIKTDYHSLLDKKEKERFEARQNWTSIENIKELKAGYISQVVHKICELVEKYDAVIALEDLNSGFKNSRVKVEKQVYQKFEKMLIDKLNYMVDKKSNPCATGGALKGYQITNKFESFKSMSTQNGFIFYIPAWLTSKIDPSTGFVNLLKTKYTSIADSKKFISSFDRIMYVPEEDLFEFALDYKNFSRTDADYIKKWKLYSYGNRIRIFRNPKKNNVFDWEEVCLTSAYKELFNKYGINYQQGDIRALLCEQSDKAFYSSFMALMSLMLQMRNSITGRTDVDFLISPVKNSDGIFYDSRNYEAQENAILPKNADANGAYNIARKVLWAIGQFKKAEDEKLDKVKIAISNKEWLEYAQTSVKH

SEQ ID NO: 175 - protein, 1375 aa, synthetic construct
MGSKLEKFTNCYSLSKTLRFKAIPVGKTQENIDNKRLLVEDEKRAEDYKGVKKLLDRYYLSFINDVLHSIKLKNLNNYISLFRKKTRTEKENKELENLEINLRKEIAKAFKGNEGYKSLFKKDIIETILPEFLDDKDEIALVNSFNGFTTAFTGFFDNRENMFSEEAKSTSIAFRCINENLTRYISNMDIFEKVDAIFDKHEVQEIKEKILNSDYDVEDFFEGEFFNFVLTQEGIDVYNAIIGGFVTESGEKIKGLNEYINLYNQKTKQKLPKFKPLYKQVLSDRESLSFYGEGSENQTTQKGQKNSRERMKRIEEGIKELGSQILKEHPVENTQLQNEKLYLYYLQNGRDMYVDQELDINRLSDYDVDHIVPQSFLKDDSIDNKVLTRSDKNRGKSDNVPSEEVVKKMKNYWRQLLNAKLITQRKFDNLTKAERGGLSGYTSDEEVLEVFRNTLNKNSEIFSSIKKLEKLFKNFDEYSSAGIFVKNGPAISTISKDIFGEWNVIRDKWNAEYDDIHLKKKAVVTEKYEDDRRKSFKKIGSFSLEQLQEYADADLSVVEKLKEIIIQKVDEIYKVYGSSEKLFDADFVLEKSLKKNDAVVAIMKDLLDSVKSFENYIKAFFGEGKETNRDESFYGDFVLAYDILLKVDHIYDAIRNYVTQKPYSKDKFKLYFQNPQFMGGWDKDKETDYRATILRYGSKYYLAIMDKKYAKCLQKIDKDDVNGNYEKINYKLLPGPNKMLPKVFFSKKWMAYYNPSEDIQKIYKNGTFKKGDMFNLNDCHKLIDFFKDSISRYPKWSNAYDFNFSETEKYKDIAGFYREVEEQGYKVSFESASKKEVDKLVEEGKLYMFQIYNKDFSDKSHGTPNLHTMYFKLLFDENNHGQIRLSGGAELFMRRASLKKEELVVHPANSPIANKNPDNPKKTTTLSYDVYKDKRFSEDQYELHIPIAINKCPKNIFKINTEVRVLLKHDDNPYVIGIDRGERNLLYIVVVDGKGNIVEQYSLNEIINNFNGIRIKTDYHSLLDKKEKERFEARQNWTSIENIKELKAGYISQVVHKICELVEKYDAVIALEDLNSGFKNSRVKVEKQVYQKFEKMLIDKLNYMVDKKSNPCATGGALKGYQITNKFESFKSMSTQNGFIFYIPAWLTSKIDPSTGFVNLLKTKYTSIADSKKFISSFDRIMYVPEEDLFEFALDYKNFSRTDADYIKKWKLYSYGNRIRIFRNPKKNNVFDWEEVCLTSAYKELFNKYGINYQQGDIRALLCEQSDKAFYSSFMALMSLMLQMRNSITGRTDVDFLISPVKNSDGIFYDSRNYEAQENAILPKNADANGAYNIARKVLWAIGQFKKAEDEKLDKVKIAISNKEWLEYAQTSVKH

SEQ ID NO: 176 - protein, 1377 aa, synthetic construct
MGSKLEKFTNCYSLSKTLRFKAIPVGKTQENIDNKRLLVEDEKRAEDYKGVKKLLDRYYLSFINDVLHSIKLKNLNNYISLFRKKTRTEKENKELENLEINLRKEIAKAFKGNEGYKSLFKKDIIETILPEFLDDKDEIALVNSFNGFTTAFTGFFDNRENMFSEEAKSTSIAFRCINENLTRYISNMDIFEKVDAIFDKHEVQEIKEKILNSDYDVEDFFEGEFFNFVLTQEGIDVYNAIIGGFVTESGEKIKGLNEYINLYNQKTKQKLPKFKPLYKQVLSDRESLSFYGEGSSGENQTTQKGQKNSRERMKRIEEGIKELGSQILKEHPVENTQLQNEKLYLYYLQNGRDMYVDQELDINRLSDYDVDHIVPQSFLKDDSIDNKVLTRSDKNRGKSDNVPSEEVVKKMKNYWRQLLNAKLITQRKFDNLTKAERGGLSGYTSDEEVLEVFRNTLNKNSEIFSSIKKLEKLFKNFDEYSSAGIFVKNGPAISTISKDIFGEWNVIRDKWNAEYDDIHLKKKAVVTEKYEDDRRKSFKKIGSFSLEQLQEYADADLSVVEKLKEIIIQKVDEIYKVYGSSEKLFDADFVLEKSLKKNDAVVAIMKDLLDSVKSFENYIKAFFGEGKETNRDESFYGDFVLAYDILLKVDHIYDAIRNYVTQKPYSKDKFKLYFQNPQFMGGWDKDKETDYRATILRYGSKYYLAIMDKKYAKCLQKIDKDDVNGNYEKINYKLLPGPNKMLPKVFFSKKWMAYYNPSEDIQKIYKNGTFKKGDMFNLNDCHKLIDFFKDSISRYPKWSNAYDFNFSETEKYKDIAGFYREVEEQGYKVSFESASKKEVDKLVEEGKLYMFQIYNKDFSDKSHGTPNLHTMYFKLLFDENNHGQIRLSGGAELFMRRASLKKEELVVHPANSPIANKNPDNPKKTTTLSYDVYKDKRFSEDQYELHIPIAINKCPKNIFKINTEVRVLLKHDDNPYVIGIDRGERNLLYIVVVDGKGNIVEQYSLNEIINNFNGIRIKTDYHSLLDKKEKERFEARQNWTSIENIKELKAGYISQVVHKICELVEKYDAVIALEDLNSGFKNSRVKVEKQVYQKFEKMLIDKLNYMVDKKSNPCATGGALKGYQITNKFESFKSMSTQNGFIFYIPAWLTSKIDPSTGFVNLLKTKYTSIADSKKFISSFDRIMYVPEEDLFEFALDYKNFSRTDADYIKKWKLYSYGNRIRIFRNPKKNNVFDWEEVCLTSAYKELFNKYGINYQQGDIRALLCEQSDKAFYSSFMALMSLMLQMRNSITGRTDVDFLISPVKNSDGIFYDSRNYEAQENAILPKNADANGAYNIARKVLWAIGQFKKAEDEKLDKVKIAISNKEWLEYAQTSVKH

SEQ ID NO: 177 - protein, 1379 aa, synthetic construct
MGSKLEKFTNCYSLSKTLRFKAIPVGKTQENIDNKRLLVEDEKRAEDYKGVKKLLDRYYLSFINDVLHSIKLKNLNNYISLFRKKTRTEKENKELENLEINLRKEIAKAFKGNEGYKSLFKKDIIETILPEFLDDKDEIALVNSFNGFTTAFTGFFDNRENMFSEEAKSTSIAFRCINENLTRYISNMDIFEKVDAIFDKHEVQEIKEKILNSDYDVEDFFEGEFFNFVLTQEGIDVYNAIIGGFVTESGEKIKGLNEYINLYNQKTKQKLPKFKPLYKQVLSDRESLSFYGEGSSGENQTTQKGQKNSRERMKRIEEGIKELGSQILKEHPVENTQLQNEKLYLYYLQNGRDMYVDQELDINRLSDYDVDHIVPQSFLKDDSIDNKVLTRSDKNRGKSDNVPSEEVVKKMKNYWRQLLNAKLITQRKFDNLTKAERGGLSGSGYTSDEEVLEVFRNTLNKNSEIFSSIKKLEKLFKNFDEYSSAGIFVKNGPAISTISKDIFGEWNVIRDKWNAEYDDIHLKKKAVVTEKYEDDRRKSFKKIGSFSLEQLQEYADADLSVVEKLKEIIIQKVDEIYKVYGSSEKLFDADFVLEKSLKKNDAVVAIMKDLLDSVKSFENYIKAFFGEGKETNRDESFYGDFVLAYDILLKVDHIYDAIRNYVTQKPYSKDKFKLYFQNPQFMGGWDKDKETDYRATILRYGSKYYLAIMDKKYAKCLQKIDKDDVNGNYEKINYKLLPGPNKMLPKVFFSKKWMAYYNPSEDIQKIYKNGTFKKGDMFNLNDCHKLIDFFKDSISRYPKWSNAYDFNFSETEKYKDIAGFYREVEEQGYKVSFESASKKEVDKLVEEGKLYMFQIYNKDFSDKSHGTPNLHTMYFKLLFDENNHGQIRLSGGAELFMRRASLKKEELVVHPANSPIANKNPDNPKKTTTLSYDVYKDKRFSEDQYELHIPIAINKCPKNIFKINTEVRVLLKHDDNPYVIGIDRGERNLLYIVVVDGKGNIVEQYSLNEIINNFNGIRIKTDYHSLLDKKEKERFEARQNWTSIENIKELKAGYISQVVHKICELVEKYDAVIALEDLNSGFKNSRVKVEKQVYQKFEKMLIDKLNYMVDKKSNPCATGGALKGYQITNKFESFKSMSTQNGFIFYIPAWLTSKIDPSTGFVNLLKTKYTSIADSKKFISSFDRIMYVPEEDLFEFALDYKNFSRTDADYIKKWKLYSYGNRIRIFRNPKKNNVFDWEEVCLTSAYKELFNKYGINYQQGDIRALLCEQSDKAFYSSFMALMSLMLQMRNSITGRTDVDFLISPVKNSDGIFYDSRNYEAQENAILPKNADANGAYNIARKVLWAIGQFKKAEDEKLDKVKIAISNKEWLEYAQTSVKH

SEQ ID NO: 178 - protein, 1787 aa, synthetic construct
MKRTADGSEFESPKKKRKVSKLEKFTNCYSLSKTLRFKAIPVGKTQENIDNKRLLVEDEKRAEDYKGVKKLLDRYYLSFINDVLHSIKLKNLNNYISLFRKKTRTEKENKELENLEINLRKEIAKAFKGNEGYKSLFKKDIIETILPEFLDDKDEIALVNSFNGFTTAFTGFFDNRENMFSEEAKSTSIAFRCINENLTRYISNMDIFEKVDAIFDKHEVQEIKEKILNSDYDVEDFFEGEFFNFVLTQEGIDVYNAIIGGFVTESGEKIKGLNEYINLYNQKTKQKLPKFKPLYKQVLSDRESLSFYGEGSSGENQTTQKGQKNSRERMKRIEEGIKELGSQILKEHPVENTQLQNEKLYLYYLQNGRDMYVDQELDINRLSDYDVDHIVPQSFLKDDSIDNKVLTRSDKNRGKSDNVPSEEVVKKMKNYWRQLLNAKLITQRKFDNLTKAERGGLSGYTSDEEVLEVFRNTLNKNSEIFSSIKKLEKLFKNFDEYSSAGIFVKNGPAISTISKDIFGEWNVIRDKWNAEYDDIHLKKKAVVTEKYEDDRRKSFKKIGSFSLEQLQEYADADLSVVEKLKEIIIQKVDEIYKVYGSSEKLFDADFVLEKSLKKNDAVVAIMKDLLDSVKSFENYIKAFFGEGKETNRDESFYGDFVLAYDILLKVDHIYDAIRNYVTQKPYSKDKFKLYFQNPQFMGGWDKDKETDYRATILRYGSKYYLAIMDKKYAKCLQKIDKDDVNGNYEKINYKLLPGPNKMLPKVFFSKKWMAYYNPSEDIQKIYKNGTFKKGDMFNLNDCHKLIDFFKDSISRYPKWSNAYDFNFSETEKYKDIAGFYREVEEQGYKVSFESASKKEVDKLVEEGKLYMFQIYNKDFSDKSHGTPNLHTMYFKLLFDENNHGQIRLSGGAELFMRRASLKKEELVVHPANSPIANKNPDNPKKTTTLSYDVYKDKRFSEDQYELHIPIAINKCPKNIFKINTEVRVLLKHDDNPYVIGIARGERNLLYIVVVDGKGNIVEQYSLNEIINNFNGIRIKTDYHSLLDKKEKERFEARQNWTSIENIKELKAGYISQVVHKICELVEKYDAVIALEDLNSGFKNSRVKVEKQVYQKFEKMLIDKLNYMVDKKSNPCATGGALKGYQITNKFESFKSMSTQNGFIFYIPAWLTSKIDPSTGFVNLLKTKYTSIADSKKFISSFDRIMYVPEEDLFEFALDYKNFSRTDADYIKKWKLYSYGNRIRIFRNPKKNNVFDWEEVCLTSAYKELFNKYGINYQQGDIRALLCEQSDKAFYSSFMALMSLMLQMRNSITGRTDVDFLISPVKNSDGIFYDSRNYEAQENAILPKNADANGAYNIARKVLWAIGQFKKAEDEKLDKVKIAISNKEWLEYAQTSVKHGGGGSGGGGSGGGGSGPKKKRKVAAAGSEELLSKNYHLENEVARLKKGSGSGGSGSGGSGSGSGGSGSGGSGSGEELLSKNYHLENEVARLKKGSGSGGSGSGGSGSGSGGSGSGGSGSGEELLSKNYHLENEVARLKKGSGSGGSGSGGSGSGSGGSGSGGSGSGEELLSKNYHLENEVARLKKGSGSGGSGSGGSGSGSGGSGSGGSGSGEELLSKNYHLENEVARLKKGSGSGGSGSGGSGSGSGGSGSGGSGSGEELLSKNYHLENEVARLKKGSGSGGSGSGGSGSGSGGSGSGGSGSGEELLSKNYHLENEVARLKKGSGSGGSGSGGSGSGSGGSGSGGSGSGEELLSKNYHLENEVARLKKSGGSKRTADGSEFEPKKKRKVGSG

SEQ ID NO: 179 - protein, 1787 aa, synthetic construct
MKRTADGSEFESPKKKRKVSKLEKFTNCYSLSKTLRFKAIPVGKTQENIDNKRLLVEDEKRAEDYKGVKKLLDRYYLSFINDVLHSIKLKNLNNYISLFRKKTRTEKENKELENLEINLRKEIAKAFKGNEGYKSLFKKDIIETILPEFLDDKDEIALVNSFNGFTTAFTGFFDNRENMFSEEAKSTSIAFRCINENLTRYISNMDIFEKVDAIFDKHEVQEIKEKILNSDYDVEDFFEGEFFNFVLTQEGIDVYNAIIGGFVTESGEKIKGLNEYINLYNQKTKQKLPKFKPLYKQVLSDRESLSFYGGSSGENQTTQKGQKNSRERMKRIEEGIKELGSQILKEHPVENTQLQNEKLYLYYLQNGRDMYVDQELDINRLSDYDVDHIVPQSFLKDDSIDNKVLTRSDKNRGKSDNVPSEEVVKKMKNYWRQLLNAKLITQRKFDNLTKAERGGLSEGYTSDEEVLEVFRNTLNKNSEIFSSIKKLEKLFKNFDEYSSAGIFVKNGPAISTISKDIFGEWNVIRDKWNAEYDDIHLKKKAVVTEKYEDDRRKSFKKIGSFSLEQLQEYADADLSVVEKLKEIIIQKVDEIYKVYGSSEKLFDADFVLEKSLKKNDAVVAIMKDLLDSVKSFENYIKAFFGEGKETNRDESFYGDFVLAYDILLKVDHIYDAIRNYVTQKPYSKDKFKLYFQNPQFMGGWDKDKETDYRATILRYGSKYYLAIMDKKYAKCLQKIDKDDVNGNYEKINYKLLPGPNKMLPKVFFSKKWMAYYNPSEDIQKIYKNGTFKKGDMFNLNDCHKLIDFFKDSISRYPKWSNAYDFNFSETEKYKDIAGFYREVEEQGYKVSFESASKKEVDKLVEEGKLYMFQIYNKDFSDKSHGTPNLHTMYFKLLFDENNHGQIRLSGGAELFMRRASLKKEELVVHPANSPIANKNPDNPKKTTTLSYDVYKDKRFSEDQYELHIPIAINKCPKNIFKINTEVRVLLKHDDNPYVIGIARGERNLLYIVVVDGKGNIVEQYSLNEIINNFNGIRIKTDYHSLLDKKEKERFEARQNWTSIENIKELKAGYISQVVHKICELVEKYDAVIALEDLNSGFKNSRVKVEKQVYQKFEKMLIDKLNYMVDKKSNPCATGGALKGYQITNKFESFKSMSTQNGFIFYIPAWLTSKIDPSTGFVNLLKTKYTSIADSKKFISSFDRIMYVPEEDLFEFALDYKNFSRTDADYIKKWKLYSYGNRIRIFRNPKKNNVFDWEEVCLTSAYKELFNKYGINYQQGDIRALLCEQSDKAFYSSFMALMSLMLQMRNSITGRTDVDFLISPVKNSDGIFYDSRNYEAQENAILPKNADANGAYNIARKVLWAIGQFKKAEDEKLDKVKIAISNKEWLEYAQTSVKHGGGGSGGGGSGGGGSGPKKKRKVAAAGSEELLSKNYHLENEVARLKKGSGSGGSGSGGSGSGSGGSGSGGSGSGEELLSKNYHLENEVARLKKGSGSGGSGSGGSGSGSGGSGSGGSGSGEELLSKNYHLENEVARLKKGSGSGGSGSGGSGSGSGGSGSGGSGSGEELLSKNYHLENEVARLKKGSGSGGSGSGGSGSGSGGSGSGGSGSGEELLSKNYHLENEVARLKKGSGSGGSGSGGSGSGSGGSGSGGSGSGEELLSKNYHLENEVARLKKGSGSGGSGSGGSGSGSGGSGSGGSGSGEELLSKNYHLENEVARLKKGSGSGGSGSGGSGSGSGGSGSGGSGSGEELLSKNYHLENEVARLKKSGGSKRTADGSEFEPKKKRKVGSG

SEQ ID NO: 180 - protein, 1789 aa, synthetic construct
MKRTADGSEFESPKKKRKVSKLEKFTNCYSLSKTLRFKAIPVGKTQENIDNKRLLVEDEKRAEDYKGVKKLLDRYYLSFINDVLHSIKLKNLNNYISLFRKKTRTEKENKELENLEINLRKEIAKAFKGNEGYKSLFKKDIIETILPEFLDDKDEIALVNSFNGFTTAFTGFFDNRENMFSEEAKSTSIAFRCINENLTRYISNMDIFEKVDAIFDKHEVQEIKEKILNSDYDVEDFFEGEFFNFVLTQEGIDVYNAIIGGFVTESGEKIKGLNEYINLYNQKTKQKLPKFKPLYKQVLSDRESLSFYGGSSGENQTTQKGQKNSRERMKRIEEGIKELGSQILKEHPVENTQLQNEKLYLYYLQNGRDMYVDQELDINRLSDYDVDHIVPQSFLKDDSIDNKVLTRSDKNRGKSDNVPSEEVVKKMKNYWRQLLNAKLITQRKFDNLTKAERGGLSGSEGYTSDEEVLEVFRNTLNKNSEIFSSIKKLEKLFKNFDEYSSAGIFVKNGPAISTISKDIFGEWNVIRDKWNAEYDDIHLKKKAVVTEKYEDDRRKSFKKIGSFSLEQLQEYADADLSVVEKLKEIIIQKVDEIYKVYGSSEKLFDADFVLEKSLKKNDAVVAIMKDLLDSVKSFENYIKAFFGEGKETNRDESFYGDFVLAYDILLKVDHIYDAIRNYVTQKPYSKDKFKLYFQNPQFMGGWDKDKETDYRATILRYGSKYYLAIMDKKYAKCLQKIDKDDVNGNYEKINYKLLPGPNKMLPKVFFSKKWMAYYNPSEDIQKIYKNGTFKKGDMFNLNDCHKLIDFFKDSISRYPKWSNAYDFNFSETEKYKDIAGFYREVEEQGYKVSFESASKKEVDKLVEEGKLYMFQIYNKDFSDKSHGTPNLHTMYFKLLFDENNHGQIRLSGGAELFMRRASLKKEELVVHPANSPIANKNPDNPKKTTTLSYDVYKDKRFSEDQYELHIPIAINKCPKNIFKINTEVRVLLKHDDNPYVIGIARGERNLLYIVVVDGKGNIVEQYSLNEIINNFNGIRIKTDYHSLLDKKEKERFEARQNWTSIENIKELKAGYISQVVHKICELVEKYDAVIALEDLNSGFKNSRVKVEKQVYQKFEKMLIDKLNYMVDKKSNPCATGGALKGYQITNKFESFKSMSTQNGFIFYIPAWLTSKIDPSTGFVNLLKTKYTSIADSKKFISSFDRIMYVPEEDLFEFALDYKNFSRTDADYIKKWKLYSYGNRIRIFRNPKKNNVFDWEEVCLTSAYKELFNKYGINYQQGDIRALLCEQSDKAFYSSFMALMSLMLQMRNSITGRTDVDFLISPVKNSDGIFYDSRNYEAQENAILPKNADANGAYNIARKVLWAIGQFKKAEDEKLDKVKIAISNKEWLEYAQTSVKHGGGGSGGGGSGGGGSGPKKKRKVAAAGSEELLSKNYHLENEVARLKKGSGSGGSGSGGSGSGSGGSGSGGSGSGEELLSKNYHLENEVARLKKGSGSGGSGSGGSGSGSGGSGSGGSGSGEELLSKNYHLENEVARLKKGSGSGGSGSGGSGSGSGGSGSGGSGSGEELLSKNYHLENEVARLKKGSGSGGSGSGGSGSGSGGSGSGGSGSGEELLSKNYHLENEVARLKKGSGSGGSGSGGSGSGSGGSGSGGSGSGEELLSKNYHLENEVARLKKGSGSGGSGSGGSGSGSGGSGSGGSGSGEELLSKNYHLENEVARLKKGSGSGGSGSGGSGSGSGGSGSGGSGSGEELLSKNYHLENEVARLKKSGGSKRTADGSEFEPKKKRKVGSG

SEQ ID NO: 181 - protein, 1739 aa, synthetic construct
MKRTADGSEFESPKKKRKVEASPASGPRHLMDPHIFTSNFNNGIGRHKTYLCYEVERLDNGTSVKMDQHRGFLHNQAKNLLCGFYGRHAELRFLDLVPSLQLDPAQIYRVTWFISWSPCFSWGCAGEVRAFLQENTHVRLRIFAARIYDYDPLYKEALQMLRDAGAQVSIMTYDEFKHCWDTFVDHQGCPFQPWDGLDEHSQALSGRLRAILQNQGNSTSQSDGSSVPADIDQSSDSDQSSSQGQPGSKLEKFTNCYSLSKTLRFKAIPVGKTQENIDNKRLLVEDEKRAEDYKGVKKLLDRYYLSFINDVLHSIKLKNLNNYISLFRKKTRTEKENKELENLEINLRKEIAKAFKGNEGYKSLFKKDIIETILPEFLDDKDEIALVNSFNGFTTAFTGFFDNRENMFSEEAKSTSIAFRCINENLTRYISNMDIFEKVDAIFDKHEVQEIKEKILNSDYDVEDFFEGEFFNFVLTQEGIDVYNAIIGGFVTESGEKIKGLNEYINLYNQKTKQKLPKFKPLYKQVLSDRESLSFYGEGSSGENQTTQKGQKNSRERMKRIEEGIKELGSQILKEHPVENTQLQNEKLYLYYLQNGRDMYVDQELDINRLSDYDVDHIVPQSFLKDDSIDNKVLTRSDKNRGKSDNVPSEEVVKKMKNYWRQLLNAKLITQRKFDNLTKAERGGLSGYTSDEEVLEVFRNTLNKNSEIFSSIKKLEKLFKNFDEYSSAGIFVKNGPAISTISKDIFGEWNVIRDKWNAEYDDIHLKKKAVVTEKYEDDRRKSFKKIGSFSLEQLQEYADADLSVVEKLKEIIIQKVDEIYKVYGSSEKLFDADFVLEKSLKKNDAVVAIMKDLLDSVKSFENYIKAFFGEGKETNRDESFYGDFVLAYDILLKVDHIYDAIRNYVTQKPYSKDKFKLYFQNPQFMGGWDKDKETDYRATILRYGSKYYLAIMDKKYAKCLQKIDKDDVNGNYEKINYKLLPGPNKMLPKVFFSKKWMAYYNPSEDIQKIYKNGTFKKGDMFNLNDCHKLIDFFKDSISRYPKWSNAYDFNFSETEKYKDIAGFYREVEEQGYKVSFESASKKEVDKLVEEGKLYMFQIYNKDFSDKSHGTPNLHTMYFKLLFDENNHGQIRLSGGAELFMRRASLKKEELVVHPANSPIANKNPDNPKKTTTLSYDVYKDKRFSEDQYELHIPIAINKCPKNIFKINTEVRVLLKHDDNPYVIGIARGERNLLYIVVVDGKGNIVEQYSLNEIINNFNGIRIKTDYHSLLDKKEKERFEARQNWTSIENIKELKAGYISQVVHKICELVEKYDAVIALEDLNSGFKNSRVKVEKQVYQKFEKMLIDKLNYMVDKKSNPCATGGALKGYQITNKFESFKSMSTQNGFIFYIPAWLTSKIDPSTGFVNLLKTKYTSIADSKKFISSFDRIMYVPEEDLFEFALDYKNFSRTDADYIKKWKLYSYGNRIRIFRNPKKNNVFDWEEVCLTSAYKELFNKYGINYQQGDIRALLCEQSDKAFYSSFMALMSLMLQMRNSITGRTDVDFLISPVKNSDGIFYDSRNYEAQENAILPKNADANGAYNIARKVLWAIGQFKKAEDEKLDKVKIAISNKEWLEYAQTSVKHSGGSGGSGGSTNLSDIIEKETGKQLVIQESILMLPEEVEEVIGNKPESDILVHTAYDESTDENVMLLTSDAPEYKPWALVIQDSNGENKIKMLSGGSKRTADGSEFEPKKKRKVGSG

SEQ ID NO: 182 - protein, 1739 aa, synthetic construct
MKRTADGSEFESPKKKRKVEASPASGPRHLMDPHIFTSNFNNGIGRHKTYLCYEVERLDNGTSVKMDQHRGFLHNQAKNLLCGFYGRHAELRFLDLVPSLQLDPAQIYRVTWFISWSPCFSWGCAGEVRAFLQENTHVRLRIFAARIYDYDPLYKEALQMLRDAGAQVSIMTYDEFKHCWDTFVDHQGCPFQPWDGLDEHSQALSGRLRAILQNQGNSTSQSDGSSVPADIDQSSDSDQSSSQGQPGSKLEKFTNCYSLSKTLRFKAIPVGKTQENIDNKRLLVEDEKRAEDYKGVKKLLDRYYLSFINDVLHSIKLKNLNNYISLFRKKTRTEKENKELENLEINLRKEIAKAFKGNEGYKSLFKKDIIETILPEFLDDKDEIALVNSFNGFTTAFTGFFDNRENMFSEEAKSTSIAFRCINENLTRYISNMDIFEKVDAIFDKHEVQEIKEKILNSDYDVEDFFEGEFFNFVLTQEGIDVYNAIIGGFVTESGEKIKGLNEYINLYNQKTKQKLPKFKPLYKQVLSDRESLSFYGGSSGENQTTQKGQKNSRERMKRIEEGIKELGSQILKEHPVENTQLQNEKLYLYYLQNGRDMYVDQELDINRLSDYDVDHIVPQSFLKDDSIDNKVLTRSDKNRGKSDNVPSEEVVKKMKNYWRQLLNAKLITQRKFDNLTKAERGGLSEGYTSDEEVLEVFRNTLNKNSEIFSSIKKLEKLFKNFDEYSSAGIFVKNGPAISTISKDIFGEWNVIRDKWNAEYDDIHLKKKAVVTEKYEDDRRKSFKKIGSFSLEQLQEYADADLSVVEKLKEIIIQKVDEIYKVYGSSEKLFDADFVLEKSLKKNDAVVAIMKDLLDSVKSFENYIKAFFGEGKETNRDESFYGDFVLAYDILLKVDHIYDAIRNYVTQKPYSKDKFKLYFQNPQFMGGWDKDKETDYRATILRYGSKYYLAIMDKKYAKCLQKIDKDDVNGNYEKINYKLLPGPNKMLPKVFFSKKWMAYYNPSEDIQKIYKNGTFKKGDMFNLNDCHKLIDFFKDSISRYPKWSNAYDFNFSETEKYKDIAGFYREVEEQGYKVSFESASKKEVDKLVEEGKLYMFQIYNKDFSDKSHGTPNLHTMYFKLLFDENNHGQIRLSGGAELFMRRASLKKEELVVHPANSPIANKNPDNPKKTTTLSYDVYKDKRFSEDQYELHIPIAINKCPKNIFKINTEVRVLLKHDDNPYVIGIARGERNLLYIVVVDGKGNIVEQYSLNEIINNFNGIRIKTDYHSLLDKKEKERFEARQNWTSIENIKELKAGYISQVVHKICELVEKYDAVIALEDLNSGFKNSRVKVEKQVYQKFEKMLIDKLNYMVDKKSNPCATGGALKGYQITNKFESFKSMSTQNGFIFYIPAWLTSKIDPSTGFVNLLKTKYTSIADSKKFISSFDRIMYVPEEDLFEFALDYKNFSRTDADYIKKWKLYSYGNRIRIFRNPKKNNVFDWEEVCLTSAYKELFNKYGINYQQGDIRALLCEQSDKAFYSSFMALMSLMLQMRNSITGRTDVDFLISPVKNSDGIFYDSRNYEAQENAILPKNADANGAYNIARKVLWAIGQFKKAEDEKLDKVKIAISNKEWLEYAQTSVKHSGGSGGSGGSTNLSDIIEKETGKQLVIQESILMLPEEVEEVIGNKPESDILVHTAYDESTDENVMLLTSDAPEYKPWALVIQDSNGENKIKMLSGGSKRTADGSEFEPKKKRKVGSG

SEQ ID NO: 183 - protein, 1741 aa, synthetic construct
MKRTADGSEFESPKKKRKVEASPASGPRHLMDPHIFTSNFNNGIGRHKTYLCYEVERLDNGTSVKMDQHRGFLHNQAKNLLCGFYGRHAELRFLDLVPSLQLDPAQIYRVTWFISWSPCFSWGCAGEVRAFLQENTHVRLRIFAARIYDYDPLYKEALQMLRDAGAQVSIMTYDEFKHCWDTFVDHQGCPFQPWDGLDEHSQALSGRLRAILQNQGNSTSQSDGSSVPADIDQSSDSDQSSSQGQPGSKLEKFTNCYSLSKTLRFKAIPVGKTQENIDNKRLLVEDEKRAEDYKGVKKLLDRYYLSFINDVLHSIKLKNLNNYISLFRKKTRTEKENKELENLEINLRKEIAKAFKGNEGYKSLFKKDIIETILPEFLDDKDEIALVNSFNGFTTAFTGFFDNRENMFSEEAKSTSIAFRCINENLTRYISNMDIFEKVDAIFDKHEVQEIKEKILNSDYDVEDFFEGEFFNFVLTQEGIDVYNAIIGGFVTESGEKIKGLNEYINLYNQKTKQKLPKFKPLYKQVLSDRESLSFYGGSSGENQTTQKGQKNSRERMKRIEEGIKELGSQILKEHPVENTQLQNEKLYLYYLQNGRDMYVDQELDINRLSDYDVDHIVPQSFLKDDSIDNKVLTRSDKNRGKSDNVPSEEVVKKMKNYWRQLLNAKLITQRKFDNLTKAERGGLSGSEGYTSDEEVLEVFRNTLNKNSEIFSSIKKLEKLFKNFDEYSSAGIFVKNGPAISTISKDIFGEWNVIRDKWNAEYDDIHLKKKAVVTEKYEDDRRKSFKKIGSFSLEQLQEYADADLSVVEKLKEIIIQKVDEIYKVYGSSEKLFDADFVLEKSLKKNDAVVAIMKDLLDSVKSFENYIKAFFGEGKETNRDESFYGDFVLAYDILLKVDHIYDAIRNYVTQKPYSKDKFKLYFQNPQFMGGWDKDKETDYRATILRYGSKYYLAIMDKKYAKCLQKIDKDDVNGNYEKINYKLLPGPNKMLPKVFFSKKWMAYYNPSEDIQKIYKNGTFKKGDMFNLNDCHKLIDFFKDSISRYPKWSNAYDFNFSETEKYKDIAGFYREVEEQGYKVSFESASKKEVDKLVEEGKLYMFQIYNKDFSDKSHGTPNLHTMYFKLLFDENNHGQIRLSGGAELFMRRASLKKEELVVHPANSPIANKNPDNPKKTTTLSYDVYKDKRFSEDQYELHIPIAINKCPKNIFKINTEVRVLLKHDDNPYVIGIARGERNLLYIVVVDGKGNIVEQYSLNEIINNFNGIRIKTDYHSLLDKKEKERFEARQNWTSIENIKELKAGYISQVVHKICELVEKYDAVIALEDLNSGFKNSRVKVEKQVYQKFEKMLIDKLNYMVDKKSNPCATGGALKGYQITNKFESFKSMSTQNGFIFYIPAWLTSKIDPSTGFVNLLKTKYTSIADSKKFISSFDRIMYVPEEDLFEFALDYKNFSRTDADYIKKWKLYSYGNRIRIFRNPKKNNVFDWEEVCLTSAYKELFNKYGINYQQGDIRALLCEQSDKAFYSSFMALMSLMLQMRNSITGRTDVDFLISPVKNSDGIFYDSRNYEAQENAILPKNADANGAYNIARKVLWAIGQFKKAEDEKLDKVKIAISNKEWLEYAQTSVKHSGGSGGSGGSTNLSDIIEKETGKQLVIQESILMLPEEVEEVIGNKPESDILVHTAYDESTDENVMLLTSDAPEYKPWALVIQDSNGENKIKMLSGGSKRTADGSEFEPKKKRKVGSG

SEQ ID NO: 184 - protein, 1734 aa, synthetic construct
MKRTADGSEFESPKKKRKVMEASPASGPRHLMDPHIFTSNFNNGIGRHKTYLCYEVERLDNGTSVKMDQHRGFLHNQAKNLLCGFYGRHAELRFLDLVPSLQLDPAQIYRVTWFISWSPCFSWGCAGEVRAFLQENTHVRLRIFAARIYDYDPLYKEALQMLRDAGAQVSIMTYDEFKHCWDTFVDHQGCPFQPWDGLDEHSQALSGRLRAILQNQGNSGSETPGTSESATPESMSKLEKFTNCYSLSKTLRFKAIPVGKTQENIDNKRLLVEDEKRAEDYKGVKKLLDRYYLSFINDVLHSIKLKNLNNYISLFRKKTRTEKENKELENLEINLRKEIAKAFKGNEGYKSLFKKDIIETILPEFLDDKDEIALVNSFNGFTTAFTGFFDNRENMFSEEAKSTSIAFRCINENLTRYISNMDIFEKVDAIFDKHEVQEIKEKILNSDYDVEDFFEGEFFNFVLTQEGIDVYNAIIGGFVTESGEKIKGLNEYINLYNQKTKQKLPKFKPLYKQVLSDRESLSFYGEGSSGENQTTQKGQKNSRERMKRIEEGIKELGSQILKEHPVENTQLQNEKLYLYYLQNGRDMYVDQELDINRLSDYDVDHIVPQSFLKDDSIDNKVLTRSDKNRGKSDNVPSEEVVKKMKNYWRQLLNAKLITQRKFDNLTKAERGGLSGYTSDEEVLEVFRNTLNKNSEIFSSIKKLEKLFKNFDEYSSAGIFVKNGPAISTISKDIFGEWNVIRDKWNAEYDDIHLKKKAVVTEKYEDDRRKSFKKIGSFSLEQLQEYADADLSVVEKLKEIIIQKVDEIYKVYGSSEKLFDADFVLEKSLKKNDAVVAIMKDLLDSVKSFENYIKAFFGEGKETNRDESFYGDFVLAYDILLKVDHIYDAIRNYVTQKPYSKDKFKLYFQNPQFMGGWDKDKETDYRATILRYGSKYYLAIMDKKYAKCLQKIDKDDVNGNYEKINYKLLPGPNKMLPKVFFSKKWMAYYNPSEDIQKIYKNGTFKKGDMFNLNDCHKLIDFFKDSISRYPKWSNAYDFNFSETEKYKDIAGFYREVEEQGYKVSFESASKKEVDKLVEEGKLYMFQIYNKDFSDKSHGTPNLHTMYFKLLFDENNHGQIRLSGGAELFMRRASLKKEELVVHPANSPIANKNPDNPKKTTTLSYDVYKDKRFSEDQYELHIPIAINKCPKNIFKINTEVRVLLKHDDNPYVIGIARGERNLLYIVVVDGKGNIVEQYSLNEIINNFNGIRIKTDYHSLLDKKEKERFEARQNWTSIENIKELKAGYISQVVHKICELVEKYDAVIALEDLNSGFKNSRVKVEKQVYQKFEKMLIDKLNYMVDKKSNPCATGGALKGYQITNKFESFKSMSTQNGFIFYIPAWLTSKIDPSTGFVNLLKTKYTSIADSKKFISSFDRIMYVPEEDLFEFALDYKNFSRTDADYIKKWKLYSYGNRIRIFRNPKKNNVFDWEEVCLTSAYKELFNKYGINYQQGDIRALLCEQSDKAFYSSFMALMSLMLQMRNSITGRTDVDFLISPVKNSDGIFYDSRNYEAQENAILPKNADANGAYNIARKVLWAIGQFKKAEDEKLDKVKIAISNKEWLEYAQTSVKHGSPKKKRKVSGGSTNLSDIIEKETGKQLVIQESILMLPEEVEEVIGNKPESDILVHTAYDESTDENVMLLTSDAPEYKPWALVIQDSNGENKIKMLTKYDSGGSKRTADGSEFEPKKKRKVGSG

SEQ ID NO: 185 - protein, 1734 aa, synthetic construct
MKRTADGSEFESPKKKRKVMEASPASGPRHLMDPHIFTSNFNNGIGRHKTYLCYEVERLDNGTSVKMDQHRGFLHNQAKNLLCGFYGRHAELRFLDLVPSLQLDPAQIYRVTWFISWSPCFSWGCAGEVRAFLQENTHVRLRIFAARIYDYDPLYKEALQMLRDAGAQVSIMTYDEFKHCWDTFVDHQGCPFQPWDGLDEHSQALSGRLRAILQNQGNSGSETPGTSESATPESMSKLEKFTNCYSLSKTLRFKAIPVGKTQENIDNKRLLVEDEKRAEDYKGVKKLLDRYYLSFINDVLHSIKLKNLNNYISLFRKKTRTEKENKELENLEINLRKEIAKAFKGNEGYKSLFKKDIIETILPEFLDDKDEIALVNSFNGFTTAFTGFFDNRENMFSEEAKSTSIAFRCINENLTRYISNMDIFEKVDAIFDKHEVQEIKEKILNSDYDVEDFFEGEFFNFVLTQEGIDVYNAIIGGFVTESGEKIKGLNEYINLYNQKTKQKLPKFKPLYKQVLSDRESLSFYGGSSGENQTTQKGQKNSRERMKRIEEGIKELGSQILKEHPVENTQLQNEKLYLYYLQNGRDMYVDQELDINRLSDYDVDHIVPQSFLKDDSIDNKVLTRSDKNRGKSDNVPSEEVVKKMKNYWRQLLNAKLITQRKFDNLTKAERGGLSEGYTSDEEVLEVFRNTLNKNSEIFSSIKKLEKLFKNFDEYSSAGIFVKNGPAISTISKDIFGEWNVIRDKWNAEYDDIHLKKKAVVTEKYEDDRRKSFKKIGSFSLEQLQEYADADLSVVEKLKEIIIQKVDEIYKVYGSSEKLFDADFVLEKSLKKNDAVVAIMKDLLDSVKSFENYIKAFFGEGKETNRDESFYGDFVLAYDILLKVDHIYDAIRNYVTQKPYSKDKFKLYFQNPQFMGGWDKDKETDYRATILRYGSKYYLAIMDKKYAKCLQKIDKDDVNGNYEKINYKLLPGPNKMLPKVFFSKKWMAYYNPSEDIQKIYKNGTFKKGDMFNLNDCHKLIDFFKDSISRYPKWSNAYDFNFSETEKYKDIAGFYREVEEQGYKVSFESASKKEVDKLVEEGKLYMFQIYNKDFSDKSHGTPNLHTMYFKLLFDENNHGQIRLSGGAELFMRRASLKKEELVVHPANSPIANKNPDNPKKTTTLSYDVYKDKRFSEDQYELHIPIAINKCPKNIFKINTEVRVLLKHDDNPYVIGIARGERNLLYIVVVDGKGNIVEQYSLNEIINNFNGIRIKTDYHSLLDKKEKERFEARQNWTSIENIKELKAGYISQVVHKICELVEKYDAVIALEDLNSGFKNSRVKVEKQVYQKFEKMLIDKLNYMVDKKSNPCATGGALKGYQITNKFESFKSMSTQNGFIFYIPAWLTSKIDPSTGFVNLLKTKYTSIADSKKFISSFDRIMYVPEEDLFEFALDYKNFSRTDADYIKKWKLYSYGNRIRIFRNPKKNNVFDWEEVCLTSAYKELFNKYGINYQQGDIRALLCEQSDKAFYSSFMALMSLMLQMRNSITGRTDVDFLISPVKNSDGIFYDSRNYEAQENAILPKNADANGAYNIARKVLWAIGQFKKAEDEKLDKVKIAISNKEWLEYAQTSVKHGSPKKKRKVSGGSTNLSDIIEKETGKQLVIQESILMLPEEVEEVIGNKPESDILVHTAYDESTDENVMLLTSDAPEYKPWALVIQDSNGENKIKMLTKYDSGGSKRTADGSEFEPKKKRKVGSG

SEQ ID NO: 186 - protein, 1736 aa, synthetic construct
MKRTADGSEFESPKKKRKVMEASPASGPRHLMDPHIFTSNFNNGIGRHKTYLCYEVERLDNGTSVKMDQHRGFLHNQAKNLLCGFYGRHAELRFLDLVPSLQLDPAQIYRVTWFISWSPCFSWGCAGEVRAFLQENTHVRLRIFAARIYDYDPLYKEALQMLRDAGAQVSIMTYDEFKHCWDTFVDHQGCPFQPWDGLDEHSQALSGRLRAILQNQGNSGSETPGTSESATPESMSKLEKFTNCYSLSKTLRFKAIPVGKTQENIDNKRLLVEDEKRAEDYKGVKKLLDRYYLSFINDVLHSIKLKNLNNYISLFRKKTRTEKENKELENLEINLRKEIAKAFKGNEGYKSLFKKDIIETILPEFLDDKDEIALVNSFNGFTTAFTGFFDNRENMFSEEAKSTSIAFRCINENLTRYISNMDIFEKVDAIFDKHEVQEIKEKILNSDYDVEDFFEGEFFNFVLTQEGIDVYNAIIGGFVTESGEKIKGLNEYINLYNQKTKQKLPKFKPLYKQVLSDRESLSFYGGSSGENQTTQKGQKNSRERMKRIEEGIKELGSQILKEHPVENTQLQNEKLYLYYLQNGRDMYVDQELDINRLSDYDVDHIVPQSFLKDDSIDNKVLTRSDKNRGKSDNVPSEEVVKKMKNYWRQLLNAKLITQRKFDNLTKAERGGLSGSEGYTSDEEVLEVFRNTLNKNSEIFSSIKKLEKLFKNFDEYSSAGIFVKNGPAISTISKDIFGEWNVIRDKWNAEYDDIHLKKKAVVTEKYEDDRRKSFKKIGSFSLEQLQEYADADLSVVEKLKEIIIQKVDEIYKVYGSSEKLFDADFVLEKSLKKNDAVVAIMKDLLDSVKSFENYIKAFFGEGKETNRDESFYGDFVLAYDILLKVDHIYDAIRNYVTQKPYSKDKFKLYFQNPQFMGGWDKDKETDYRATILRYGSKYYLAIMDKKYAKCLQKIDKDDVNGNYEKINYKLLPGPNKMLPKVFFSKKWMAYYNPSEDIQKIYKNGTFKKGDMFNLNDCHKLIDFFKDSISRYPKWSNAYDFNFSETEKYKDIAGFYREVEEQGYKVSFESASKKEVDKLVEEGKLYMFQIYNKDFSDKSHGTPNLHTMYFKLLFDENNHGQIRLSGGAELFMRRASLKKEELVVHPANSPIANKNPDNPKKTTTLSYDVYKDKRFSEDQYELHIPIAINKCPKNIFKINTEVRVLLKHDDNPYVIGIARGERNLLYIVVVDGKGNIVEQYSLNEIINNFNGIRIKTDYHSLLDKKEKERFEARQNWTSIENIKELKAGYISQVVHKICELVEKYDAVIALEDLNSGFKNSRVKVEKQVYQKFEKMLIDKLNYMVDKKSNPCATGGALKGYQITNKFESFKSMSTQNGFIFYIPAWLTSKIDPSTGFVNLLKTKYTSIADSKKFISSFDRIMYVPEEDLFEFALDYKNFSRTDADYIKKWKLYSYGNRIRIFRNPKKNNVFDWEEVCLTSAYKELFNKYGINYQQGDIRALLCEQSDKAFYSSFMALMSLMLQMRNSITGRTDVDFLISPVKNSDGIFYDSRNYEAQENAILPKNADANGAYNIARKVLWAIGQFKKAEDEKLDKVKIAISNKEWLEYAQTSVKHGSPKKKRKVSGGSTNLSDIIEKETGKQLVIQESILMLPEEVEEVIGNKPESDILVHTAYDESTDENVMLLTSDAPEYKPWALVIQDSNGENKIKMLTKYDSGGSKRTADGSEFEPKKKRKVGSG

SEQ ID NO: 187 - protein, 1616 aa, synthetic construct
MKRTADGSEFESPKKKRKVSEVEFSHEYWMRHALTLAKRARDEREVPVGAVLVLNNRVIGEGWNRAIGLHDPTAHAEIMALRQGGLVMQNYRLIDATLYVTFEPCVMCAGAMIHSRIGRVVFGVRNSKRGAAGSLMNVLNYPGMNHRVEITEGILADECAALLCDFYRMPRQVFNAQKKAQSSINSGGSSGGSSGSETPGTSESATPESSGGSSGGSSKLEKFTNCYSLSKTLRFKAIPVGKTQENIDNKRLLVEDEKRAEDYKGVKKLLDRYYLSFINDVLHSIKLKNLNNYISLFRKKTRTEKENKELENLEINLRKEIAKAFKGNEGYKSLFKKDIIETILPEFLDDKDEIALVNSFNGFTTAFTGFFDNRENMFSEEAKSTSIAFRCINENLTRYISNMDIFEKVDAIFDKHEVQEIKEKILNSDYDVEDFFEGEFFNFVLTQEGIDVYNAIIGGFVTESGEKIKGLNEYINLYNQKTKQKLPKFKPLYKQVLSDRESLSFYGEGSSGENQTTQKGQKNSRERMKRIEEGIKELGSQILKEHPVENTQLQNEKLYLYYLQNGRDMYVDQELDINRLSDYDVDHIVPQSFLKDDSIDNKVLTRSDKNRGKSDNVPSEEVVKKMKNYWRQLLNAKLITQRKFDNLTKAERGGLSGYTSDEEVLEVFRNTLNKNSEIFSSIKKLEKLFKNFDEYSSAGIFVKNGPAISTISKDIFGEWNVIRDKWNAEYDDIHLKKKAVVTEKYEDDRRKSFKKIGSFSLEQLQEYADADLSVVEKLKEIIIQKVDEIYKVYGSSEKLFDADFVLEKSLKKNDAVVAIMKDLLDSVKSFENYIKAFFGEGKETNRDESFYGDFVLAYDILLKVDHIYDAIRNYVTQKPYSKDKFKLYFQNPQFMGGWDKDKETDYRATILRYGSKYYLAIMDKKYAKCLQKIDKDDVNGNYEKINYKLLPGPNKMLPKVFFSKKWMAYYNPSEDIQKIYKNGTFKKGDMFNLNDCHKLIDFFKDSISRYPKWSNAYDFNFSETEKYKDIAGFYREVEEQGYKVSFESASKKEVDKLVEEGKLYMFQIYNKDFSDKSHGTPNLHTMYFKLLFDENNHGQIRLSGGAELFMRRASLKKEELVVHPANSPIANKNPDNPKKTTTLSYDVYKDKRFSEDQYELHIPIAINKCPKNIFKINTEVRVLLKHDDNPYVIGIARGERNLLYIVVVDGKGNIVEQYSLNEIINNFNGIRIKTDYHSLLDKKEKERFEARQNWTSIENIKELKAGYISQVVHKICELVEKYDAVIALEDLNSGFKNSRVKVEKQVYQKFEKMLIDKLNYMVDKKSNPCATGGALKGYQITNKFESFKSMSTQNGFIFYIPAWLTSKIDPSTGFVNLLKTKYTSIADSKKFISSFDRIMYVPEEDLFEFALDYKNFSRTDADYIKKWKLYSYGNRIRIFRNPKKNNVFDWEEVCLTSAYKELFNKYGINYQQGDIRALLCEQSDKAFYSSFMALMSLMLQMRNSITGRTDVDFLISPVKNSDGIFYDSRNYEAQENAILPKNADANGAYNIARKVLWAIGQFKKAEDEKLDKVKIAISNKEWLEYAQTSVKHSGGSKRTADGSEFEPKKKRKVGSG

SEQ ID NO: 188 - protein, 1616 aa, synthetic construct
MKRTADGSEFESPKKKRKVSEVEFSHEYWMRHALTLAKRARDEREVPVGAVLVLNNRVIGEGWNRAIGLHDPTAHAEIMALRQGGLVMQNYRLIDATLYVTFEPCVMCAGAMIHSRIGRVVFGVRNSKRGAAGSLMNVLNYPGMNHRVEITEGILADECAALLCDFYRMPRQVFNAQKKAQSSINSGGSSGGSSGSETPGTSESATPESSGGSSGGSSKLEKFTNCYSLSKTLRFKAIPVGKTQENIDNKRLLVEDEKRAEDYKGVKKLLDRYYLSFINDVLHSIKLKNLNNYISLFRKKTRTEKENKELENLEINLRKEIAKAFKGNEGYKSLFKKDIIETILPEFLDDKDEIALVNSFNGFTTAFTGFFDNRENMFSEEAKSTSIAFRCINENLTRYISNMDIFEKVDAIFDKHEVQEIKEKILNSDYDVEDFFEGEFFNFVLTQEGIDVYNAIIGGFVTESGEKIKGLNEYINLYNQKTKQKLPKFKPLYKQVLSDRESLSFYGGSSGENQTTQKGQKNSRERMKRIEEGIKELGSQILKEHPVENTQLQNEKLYLYYLQNGRDMYVDQELDINRLSDYDVDHIVPQSFLKDDSIDNKVLTRSDKNRGKSDNVPSEEVVKKMKNYWRQLLNAKLITQRKFDNLTKAERGGLSEGYTSDEEVLEVFRNTLNKNSEIFSSIKKLEKLFKNFDEYSSAGIFVKNGPAISTISKDIFGEWNVIRDKWNAEYDDIHLKKKAVVTEKYEDDRRKSFKKIGSFSLEQLQEYADADLSVVEKLKEIIIQKVDEIYKVYGSSEKLFDADFVLEKSLKKNDAVVAIMKDLLDSVKSFENYIKAFFGEGKETNRDESFYGDFVLAYDILLKVDHIYDAIRNYVTQKPYSKDKFKLYFQNPQFMGGWDKDKETDYRATILRYGSKYYLAIMDKKYAKCLQKIDKDDVNGNYEKINYKLLPGPNKMLPKVFFSKKWMAYYNPSEDIQKIYKNGTFKKGDMFNLNDCHKLIDFFKDSISRYPKWSNAYDFNFSETEKYKDIAGFYREVEEQGYKVSFESASKKEVDKLVEEGKLYMFQIYNKDFSDKSHGTPNLHTMYFKLLFDENNHGQIRLSGGAELFMRRASLKKEELVVHPANSPIANKNPDNPKKTTTLSYDVYKDKRFSEDQYELHIPIAINKCPKNIFKINTEVRVLLKHDDNPYVIGIARGERNLLYIVVVDGKGNIVEQYSLNEIINNFNGIRIKTDYHSLLDKKEKERFEARQNWTSIENIKELKAGYISQVVHKICELVEKYDAVIALEDLNSGFKNSRVKVEKQVYQKFEKMLIDKLNYMVDKKSNPCATGGALKGYQITNKFESFKSMSTQNGFIFYIPAWLTSKIDPSTGFVNLLKTKYTSIADSKKFISSFDRIMYVPEEDLFEFALDYKNFSRTDADYIKKWKLYSYGNRIRIFRNPKKNNVFDWEEVCLTSAYKELFNKYGINYQQGDIRALLCEQSDKAFYSSFMALMSLMLQMRNSITGRTDVDFLISPVKNSDGIFYDSRNYEAQENAILPKNADANGAYNIARKVLWAIGQFKKAEDEKLDKVKIAISNKEWLEYAQTSVKHSGGSKRTADGSEFEPKKKRKVGSG

SEQ ID NO: 189 - protein, 1618 aa, synthetic construct
MKRTADGSEFESPKKKRKVSEVEFSHEYWMRHALTLAKRARDEREVPVGAVLVLNNRVIGEGWNRAIGLHDPTAHAEIMALRQGGLVMQNYRLIDATLYVTFEPCVMCAGAMIHSRIGRVVFGVRNSKRGAAGSLMNVLNYPGMNHRVEITEGILADECAALLCDFYRMPRQVFNAQKKAQSSINSGGSSGGSSGSETPGTSESATPESSGGSSGGSSKLEKFTNCYSLSKTLRFKAIPVGKTQENIDNKRLLVEDEKRAEDYKGVKKLLDRYYLSFINDVLHSIKLKNLNNYISLFRKKTRTEKENKELENLEINLRKEIAKAFKGNEGYKSLFKKDIIETILPEFLDDKDEIALVNSFNGFTTAFTGFFDNRENMFSEEAKSTSIAFRCINENLTRYISNMDIFEKVDAIFDKHEVQEIKEKILNSDYDVEDFFEGEFFNFVLTQEGIDVYNAIIGGFVTESGEKIKGLNEYINLYNQKTKQKLPKFKPLYKQVLSDRESLSFYGGSSGENQTTQKGQKNSRERMKRIEEGIKELGSQILKEHPVENTQLQNEKLYLYYLQNGRDMYVDQELDINRLSDYDVDHIVPQSFLKDDSIDNKVLTRSDKNRGKSDNVPSEEVVKKMKNYWRQLLNAKLITQRKFDNLTKAERGGLSGSEGYTSDEEVLEVFRNTLNKNSEIFSSIKKLEKLFKNFDEYSSAGIFVKNGPAISTISKDIFGEWNVIRDKWNAEYDDIHLKKKAVVTEKYEDDRRKSFKKIGSFSLEQLQEYADADLSVVEKLKEIIIQKVDEIYKVYGSSEKLFDADFVLEKSLKKNDAVVAIMKDLLDSVKSFENYIKAFFGEGKETNRDESFYGDFVLAYDILLKVDHIYDAIRNYVTQKPYSKDKFKLYFQNPQFMGGWDKDKETDYRATILRYGSKYYLAIMDKKYAKCLQKIDKDDVNGNYEKINYKLLPGPNKMLPKVFFSKKWMAYYNPSEDIQKIYKNGTFKKGDMFNLNDCHKLIDFFKDSISRYPKWSNAYDFNFSETEKYKDIAGFYREVEEQGYKVSFESASKKEVDKLVEEGKLYMFQIYNKDFSDKSHGTPNLHTMYFKLLFDENNHGQIRLSGGAELFMRRASLKKEELVVHPANSPIANKNPDNPKKTTTLSYDVYKDKRFSEDQYELHIPIAINKCPKNIFKINTEVRVLLKHDDNPYVIGIARGERNLLYIVVVDGKGNIVEQYSLNEIINNFNGIRIKTDYHSLLDKKEKERFEARQNWTSIENIKELKAGYISQVVHKICELVEKYDAVIALEDLNSGFKNSRVKVEKQVYQKFEKMLIDKLNYMVDKKSNPCATGGALKGYQITNKFESFKSMSTQNGFIFYIPAWLTSKIDPSTGFVNLLKTKYTSIADSKKFISSFDRIMYVPEEDLFEFALDYKNFSRTDADYIKKWKLYSYGNRIRIFRNPKKNNVFDWEEVCLTSAYKELFNKYGINYQQGDIRALLCEQSDKAFYSSFMALMSLMLQMRNSITGRTDVDFLISPVKNSDGIFYDSRNYEAQENAILPKNADANGAYNIARKVLWAIGQFKKAEDEKLDKVKIAISNKEWLEYAQTSVKHSGGSKRTADGSEFEPKKKRKVGSG

SEQ ID NO: 190 - DNA, 66 bp, Saccharomyces bayanus
  source 1..66: mol_type = other DNA
ttcttgtcgtacttatagatcgctacgttatttcaattttgaaaatctgagtcctgggagtgcgga

SEQ ID NO: 191 - protein, 605 aa, Homo sapiens
MSGWESYYKTEGDEEAEEEQEENLEASGDYKYSGRDSLIFLVDASKAMFESQSEDELTPFDMSIQCIQSVYISKIISSDRDLLAWFYGTEKDKNSVNFKIYVLQELDNPGAKRILELDQFKGQQGQKRFQDMMGHGSDYSLSEVLWVCANLFSDVQFKMSHKRIMLFTNEDNPHGNDSAKASRARTKAGDLRDTGIFLDLHLKKPGGFDISLFYRDIISIAEDEDLRVHFEESSKLEDLLRKVRAKETRKRALSRLKLKLNKDIVISVGIYNLVQKALKPPPIKLYRETNEPVKTKTRTFNTSTGGLLLPSDTKRSQIYGSRQIILEKEETEELKRFDDPGLMLMGFKPLVLLKKHHYLRPSLFVYPEESLVIGSSTLFSALLIKCLEKEVAALCRYTPRRNIPPYFVALVPQEEELDDQKIQVTPPGFQLVFLPFADDKRKMPFTEKIMATPEQVGKMKAIVEKLRFTYRSDSFENPVLQQHFRNLEALALDLMEPEQAVDLTLPKVEAMNKRLGSLVDEFKELVYPPDYNPEGKVTKRKHDNEGSGSKRPKVEYSEEELKTHISKGTLGKFTVPLKEACRAYGLKSGLKKQELLEALTKHFQD

SEQ ID NO: 192 - protein, 482 aa, synthetic construct
  REGION 1..482: note = Synthetic polypeptide
MVRSGNKAAWLCMDVGFTMSNSIPGIESPFEQAKKVITMFVQRQVFAENKDEIALVLFGTDGTDNPLSGGDQYQNITVHRHLMLPDFDLLEDIESKIQPGSQQADFLDALIVSMDVIQHETIGKKFEKRHIEIFTDLSSRFSKSQLDIIIHSLKKCDISERHSIHWPCRLTIGSNLSIRIAAYKSILQERVKKTTWDAKTLKKEDIQKETVYCLNDDDETEVLKEDIIQGFRYGSDIVPFSKVDEEQMKYKSEGKCFSVLGFCKSSQVQRRFFMGNQVLKVFAARDDEAAAVALSSLIHALDDLDIWAIVRYAYDKRANPQVGVAFPHIKHNYECLVYVQLPFMEDLRQYMFSSLKNSKKYAPTEAQLNAVDALIDSMSLAKKDEKTDTLEDLFPTTKIPNPRFQRLFQCLLHRALHPREPLPPIQQHIWNMLNPPAEVTTKSQIPLSKIKTLFPLIEAKKKDQVTAQEIFQDNHEDGPTAK

SEQ ID NO: 193 - DNA, 10 bp, Methanobacterium thermoautotrophicum
  source 1..10: mol_type = other DNA
aatttttgga

SEQ ID NO: 194 - protein, 83 aa, Methanobacterium thermoautotrophicum
GSVIDVSSQRVNVQRPLDALGNSLNSPVIIKLKGDREFRGVLKSFDLHMNLVLNDAEELEDGEVTRRLGTVLIRGDNIVYISP

SEQ ID NO: 195 - DNA, 25 bp, Emesvirus zinderi
  source 1..25: mol_type = other DNA
gcgcacatgaggatcacccatgtgc

SEQ ID NO: 196 - protein, 116 aa, Emesvirus zinderi
MASNFTQFVLVDNGGTGDVTVAPSNFANGIAEISSNSRSQAYKVTCSVRQSSAQNRKYTIKVEVPKGAWRSYLNMELTIPIFATNSDCELIVKAMQGLLKDGNPIPSAIAANSGIY

SEQ ID NO: 197 - DNA, 26 bp, Pepevirus rubrum
  source 1..26: mol_type = other DNA
ataaggagtttatatggaaaccctta

SEQ ID NO: 198 - protein, 127 aa, Pepevirus rubrum
MSKTIVLSVGEATRTLTEIQSTADRQIFEEKVGPLVGRLRLTASLRQNGAKTAYRVNLKLDQADWDCSTSVCGELPKVRYTQVWSHDVTIVANSTEASRKSLYDLTKSLVATSQVEDLVVNLVPLGR

SEQ ID NO: 199 - DNA, 19 bp, Shigella flexneri
  source 1..19: mol_type = other DNA
ctgaatgcctgcgagcatc

SEQ ID NO: 200 - protein, 62 aa, Shigella flexneri
MKSIRCKNCNKLLFKADSFDHIEIRCPRCKRHIIMLNACEHPTEKHCGKREKITHSDETVRY

SEQ ID NO: 201 - protein, 24 aa, synthetic construct
EELLSKNYHLENEVARLKKGSGSG

SEQ ID NO: 202 - protein, 241 aa, synthetic construct
EEELLSKNYHLENEVARLKKGSGSGEELLSKNYHLENEVARLKKGSGSGEELLSKNYHLENEVARLKKGSGSGEELLSKNYHLENEVARLKKGSGSGEELLSKNYHLENEVARLKKGSGSGEELLSKNYHLENEVARLKKGSGSGEELLSKNYHLENEVARLKKGSGSGEELLSKNYHLENEVARLKKGSGSGEELLSKNYHLENEVARLKKGSGSGEELLSKNYHLENEVARLKKGSGSG

SEQ ID NO: 203 - protein, 277 aa, synthetic construct
MGPDIVMTQSPSSLSASVGDRVTITCRSSTGAVTTSNYASWVQEKPGKLFKGLIGGTNNRAPGVPSRFSGSLIGDKATLTISSLQPEDFATYFCALWYSNHWVFGQGTKVELKRGGGGSGGGGSGGGGSSGGGSEVKLLESGGGLVQPGGSLKLSCAVSGFSLTDYGVNWVRQAPGRGLEWIGVIWGDGITDYNSALKDRFIISKDNGKNTVYLQMSKVRSDDTALYYCVTGLFDYWGQGTLVTVSSYPYDVPDYAGGGGGSGGGGSGGGGSGGGGS

SEQ ID NO: 204 - protein, 228 aa, Rattus norvegicus
SSETGPVAVDPTLRRRIEPHEFEVFFDPRELRKETCLLYEINWGGRHSIWRHTSQNTNKHVEVNFIEKFTTERYFCPNTRCSITWFLSWSPCGECSRAITEFLSRYPHVTLFIYIARLYHHADPRNRQGLRDLISSGVTIQIMTEQESGYCWRNFVNYSPSNEAHWPRYPHLWVRLYVLELYCIILGLPPCLNILRRKQPQLTFFTIALQSCHYQRLPPHILWATGLK

SEQ ID NO: 205 - protein, 199 aa, Homo sapiens
MEASPASGPRHLMDPHIFTSNFNNGIGRHKTYLCYEVERLDNGTSVKMDQHRGFLHNQAKNLLCGFYGRHAELRFLDLVPSLQLDPAQIYRVTWFISWSPCFSWGCAGEVRAFLQENTHVRLRIFAARIYDYDPLYKEALQMLRDAGAQVSIMTYDEFKHCWDTFVDHQGCPFQPWDGLDEHSQALSGRLRAILQNQGN

SEQ ID NO: 206 - DNA, 621 bp, Petromyzon marinus
  source 1..621: mol_type = other DNA
acagatgcagagtatgtgagaattcacgaaaagctggacatctataccttcaagaagcagttctttaacaataagaagtctgtgagccataggtgctacgtgctgttcgagctgaagagaaggggtgaaagaagggcatgtttttgggggtatgctgtgaacaagccccagtctggaactgagagaggcattcacgccgaaattttcagcatcagaaaggtggaggaatacctgagggataaccctggacagtttacaattaattggtattctagctggtctccatgcgctgactgtgccgagaagatcctggaatggtacaaccaggagctgagaggaaatggccataccctgaagatttgggcctgcaagctgtactatgaaaagaacgcaagaaatcagatcggactgtggaacctgagggataatggtgtggggctgaacgtgatggtgtccgagcactatcagtgctgtagaaagattttcattcagtcctcacataatcagctgaacgagaatagatggctggaaaagactctgaagagggctgagaagagaaggtccgaactgtcaattatgatccaggtgaagatcctgcacaccactaagtcacctgccgtg

SEQ ID NO: 207 - protein, 229 aa, Rattus norvegicus [sequence omitted]

SEQ ID NO: 208 - protein, 198 aa, Homo sapiens [sequence omitted]

SEQ ID NO: 209 - protein, 160 aa, synthetic construct
FERNYDPRELRKETYLLYEIKWGKSGKLWRHWCQNNRTQHAEVYFLENIFNARRFNPSTHCSITWYLSWSPCAECSQKIVDFLKEHPNVLEIYVARLYYHEDERNRQGLRDLVNSGVTIRIMDLPDYNYCWKTFVSDQGGDEDYWPGHFAPWIKQYSLKL

SEQ ID NO: 210 - protein, 197 aa, synthetic construct
MDSLLMNRREFLYQFKNVRWAKGRRETYLCYVVKRRDSATSFSLDFGYLRNKNGCHVELLFLRYISDWDLDPGRCYRVTWFISWSPCYDCARHVADFLRGNPNLSLRIFTARLYFCEDRKAEPEGLRRLHRAGVQIAIMTFKDYFYCWNTFVENHGRTFKAWEGLHENSVRLSRQLRRILLPLYEVDDLRDAFRTCT

SEQ ID NO: 211 - protein, 207 aa, synthetic construct
TDAEYVRIHEKLDIYTFKKQFSNNKKSVSHRCYVLFELKRRGERRACFWGYAVNKPQSGTERGIHAEIFSIRKVEEYLRDNPGQFTINWYSSWSPCADCAEKILEWYNQELRGNGHTLKIWVCKLYYEKNARNQIGLWNLRDNGVGLNVMVSEHYQCCRKIFIQSSHNQLNENRWLEKTLKRAEKRRSELSIMFQVKILHTTKSPAV

SEQ ID NO: 212 - protein, 228 aa, synthetic construct
SSKTGPVAVDPTLRRRIEPHEFEVFFDPRELRKETCLLYEINWGGRHSIWRHTSQNTNKHVEVNFIEKFTTERYFCPNTRCSITWFLSWSPCGECSRAITEFLSRYPNVTLFIYIARLYHLANPRNRQGLRDLISSGVTIQIMTEQESGYCWHNFVNYSPSNESHWPRYPHLWVRLYVLELYCIILGLPPCLNILRRKQSQLTSFTIALQSCHYQRLPPHILWATGLK

SEQ ID NO: 213 - protein, 162 aa, synthetic construct
SFERNYDPRELRKETYLLYEIKWGKSGKLWRHWCQNNRTQHAEVYFLENIFNARRFNPSTHCSITWYLSWSPCAECSQKIVDFLKEHPNVNLEIYVARLYYPENERNRQGLRDLVNSGVTIRIMDLPDYNYCWKTFVSDQGGDEDYWPGHFAPWIKQYSLKL

SEQ ID NO: 214 - protein, 83 aa, unidentified
  source 1..83: note = Bacillus phage AR9
TNLSDIIEKETGKQLVIQESILMLPEEVEEVIGNKPESDILVHTAYDESTDENVMLLTSDAPEYKPWALVIQDSNGENKIKML

SEQ ID NO: 215 - protein, 166 aa, Escherichia coli
SEVEFSHEYWMRHALTLAKRAWDEREVPVGAVLVHNNRVIGEGWNRPIGRHDPTAHAEIMALRQGGLVMQNYRLIDATLYVTLEPCVMCAGAMIHSRIGRVVFGARDAKTGAAGSLMDVLHHPGMNHRVEITEGILADECAALLSDFFRMRRQEIKAQKKAQSSTD

SEQ ID NO: 216 - protein, 166 aa, synthetic construct
  REGION 1..166: note = Synthetic polypeptide
SEVEFSHEYWMRHALTLAKRARDEREVPVGAVLVLNNRVIGEGWNRAIGLHDPTAHAEIMALRQGGLVMQNYRLIDATLYVTFEPCVMCAGAMIHSRIGRVVFGVRNAKTGAAGSLMDVLHYPGMNHRVEITEGILADECAALLCYFFRMPRQVFNAQKKAQSSTD

SEQ ID NO: 217 - protein, 166 aa, synthetic construct
  REGION 1..166: note = Synthetic polypeptide
SEVEFSHEYWMRHALTLAKRAWDEREVPVGAVLVLNNRVIGEGWNRSIGLHDPTAHAEIMALRQGGLVMQNYRLIDATLYVTFEPCVMCAGAMIHSRIGRVVFGVRNAKTGAAGSLMDVLHYPGMNHRVEITEGILADECAALLCYFFRMRRQVFNAQKKAQSSTD

SEQ ID NO: 218 - protein, 166 aa, synthetic construct
  REGION 1..166: note = Synthetic polypeptide
SEVEFSHEYWMRHALTLAKRALDEREVPVGAVLVLNNRVIGEGWNRAIGLHDPTAHAEIMALRQGGLVMQNYRLIDATLYVTFEPCVMCAGAMIHSRIGRVVFGVRNAKTGAAGSLMDVLHYPGMNHRVEITEGILADECNALLCYFFRMRRQVFNAQKKAQSSTD

SEQ ID NO: 219 - protein, 166 aa, synthetic construct
  REGION 1..166: note = Synthetic polypeptide
SEVEFSHEYWMRHALTLAKRALDEREVPVGAVLVLNNRVIGEGWNRAIGLHDPTAHAEIMALRQGGLVMQNYRLIDATLYVTFEPCVMCAGAMIHSRIGRVVFGVRNAKTGAAGSLMDVLHYPGMNHRVEITEGILADECNALLCYFFRMPRQVFNAQKKAQSSTD

SEQ ID NO: 220 - protein, 1763 aa, synthetic construct
  REGION 1..1763: note = Synthetic polypeptide
SEVEFSHEYWMRHALTLAKRAWDEREVPVGAVLVHNNRVIGEGWNRPIGRHDPTAHAEIMALRQGGLVMQNYRLIDATLYVTLEPCVMCAGAMIHSRIGRVVFGARDAKTGAAGSLMDVLHHPGMNHRVEITEGILADECAALLSDFFRMRRQEIKAQKKAQSSTDSGGSSGGSSGSETPGTSESATPESSGGSSGGSSEVEFSHEYWMRHALTLAKRARDEREVPVGAVLVLNNRVIGEGWNRAIGLHDPTAHAEIMALRQGGLVMQNYRLIDATLYVTFEPCVMCAGAMIHSRIGRVVFGVRNAKTGAAGSLMDVLHYPGMNHRVEITEGILADECAALLCYFFRMPRQVFNAQKKAQSSTDSGGSSGGSSGSETPGTSESATPESSGGSSGGSDKKYSIGLAIGTNSVGWAVITDEYKVPSKKFKVLGNTDRHSIKKNLIGALLFDSGETAEATRLKRTARRRYTRRKNRICYLQEIFSNEMAKVDDSFFHRLEESFLVEEDKKHERHPIFGNIVDEVAYHEKYPTIYHLRKKLVDSTDKADLRLIYLALAHMIKFRGHFLIEGDLNPDNSDVDKLFIQLVQTYNQLFEENPINASGVDAKAILSARLSKSRRLENLIAQLPGEKKNGLFGNLIALSLGLTPNFKSNFDLAEDAKLQLSKDTYDDDLDNLLAQIGDQYADLFLAAKNLSDAILLSDILRVNTEITKAPLSASMIKRYDEHHQDLTLLKALVRQQLPEKYKEIFFDQSKNGYAGYIDGGASQEEFYKFIKPILEKMDGTEELLVKLNREDLLRKQRTFDNGSIPHQIHLGELHAILRRQEDFYPFLKDNREKIEKILTFRIPYYVGPLARGNSRFAWMTRKSEETITPWNFEEVVDKGASAQSFIERMTNFDKNLPNEKVLPKHSLLYEYFTVYNELTKVKYVTEGMRKPAFLSGEQKKAIVDLLFKTNRKVTVKQLKEDYFKKIECFDSVEISGVEDRFNASLGTYHDLLKIIKDKDFLDNEENEDILEDIVLTLTLFEDREMIEERLKTYAHLFDDKVMKQLKRRRYTGWGRLSRKLINGIRDKQSGKTILDFLKSDGFANRNFMQLIHDDSLTFKEDIQKAQVSGQGDSLHEHIANLAGSPAIKKGILQTVKVVDELVKVMGRHKPENIVIEMARENQTTQKGQKNSRERMKRIEEGIKELGSQILKEHPVENTQLQNEKLYLYYLQNGRDMYVDQELDINRLSDYDVDHIVPQSFLKDDSIDNKVLTRSDKNRGKSDNVPSEEVVKKMKNYWRQLLNAKLITQRKFDNLTKAERGGLSELDKAGFIKRQLVETRQITKHVAQILDSRMNTKYDENDKLIREVKVITLKSKLVSDFRKDFQFYKVREINNYHHAHDAYLNAVVGTALIKKYPKLESEFVYGDYKVYDVRKMIAKSEQEIGKATAKYFFYSNIMNFFKTEITLANGEIRKRPLIETNGETGEIVWDKGRDFATVRKVLSMPQVNIVKKTEVQTGGFSKESILPKRNSDKLIARKKDWDPKKYGGFDSPTVAYSVLVVAKVEKGKSKKLKSVKELLGITIMERSSFEKNPIDFLEAKGYKEVKKDLIIKLPKYSLFELENGRKRMLASAGELQKGNELALPSKYVNFLYLASHYEKLKGSPEDNEQKQLFVEQHKHYLDEIIEQISEFSKRVILADANLDKVLSAYNKHRDKPIREQAENIIHLFTLTNLGAPAAFKYFDTTIDRKRYTSTKEVLDATLIHQSITGLYETRIDLSQLGGD

SEQ ID NO: 221 - protein, 1565 aa, synthetic construct
  REGION 1..1565: note = Synthetic polypeptide
SEVEFSHEYWMRHALTLAKRARDEREVPVGAVLVLNNRVIGEGWNRAIGLHDPTAHAEIMALRQGGLVMQNYRLIDATLYVTFEPCVMCAGAMIHSRIGRVVFGVRNSKRGAAGSLMNVLNYPGMNHRVEITEGILADECAALLCDFYRMPRQVFNAQKKAQSSINSGGSSGGSSGSETPGTSESATPESSGGSSGGSDKKYSIGLAIGTNSVGWAVITDEYKVPSKKFKVLGNTDRHSIKKNLIGALLFDSGETAEATRLKRTARRRYTRRKNRICYLQEIFSNEMAKVDDSFFHRLEESFLVEEDKKHERHPIFGNIVDEVAYHEKYPTIYHLRKKLVDSTDKADLRLIYLALAHMIKFRGHFLIEGDLNPDNSDVDKLFIQLVQTYNQLFEENPINASGVDAKAILSARLSKSRRLENLIAQLPGEKKNGLFGNLIALSLGLTPNFKSNFDLAEDAKLQLSKDTYDDDLDNLLAQIGDQYADLFLAAKNLSDAILLSDILRVNTEITKAPLSASMIKRYDEHHQDLTLLKALVRQQLPEKYKEIFFDQSKNGYAGYIDGGASQEEFYKFIKPILEKMDGTEELLVKLNREDLLRKQRTFDNGSIPHQIHLGELHAILRRQEDFYPFLKDNREKIEKILTFRIPYYVGPLARGNSRFAWMTRKSEETITPWNFEEVVDKGASAQSFIERMTNFDKNLPNEKVLPKHSLLYEYFTVYNELTKVKYVTEGMRKPAFLSGEQKKAIVDLLFKTNRKVTVKQLKEDYFKKIECFDSVEISGVEDRFNASLGTYHDLLKIIKDKDFLDNEENEDILEDIVLTLTLFEDREMIEERLKTYAHLFDDKVMKQLKRRRYTGWGRLSRKLINGIRDKQSGKTILDFLKSDGFANRNFMQLIHDDSLTFKEDIQKAQVSGQGDSLHEHIANLAGSPAIKKGILQTVKVVDELVKVMGRHKPENIVIEMARENQTTQKGQKNSRERMKRIEEGIKELGSQILKEHPVENTQLQNEKLYLYYLQNGRDMYVDQELDINRLSDYDVDHIVPQSFLKDDSIDNKVLTRSDKNRGKSDNVPSEEVVKKMKNYWRQLLNAKLITQRKFDNLTKAERGGLSELDKAGFIKRQLVETRQITKHVAQILDSRMNTKYDENDKLIREVKVITLKSKLVSDFRKDFQFYKVREINNYHHAHDAYLNAVVGTALIKKYPKLESEFVYGDYKVYDVRKMIAKSEQEIGKATAKYFFYSNIMNFFKTEITLANGEIRKRPLIETNGETGEIVWDKGRDFATVRKVLSMPQVNIVKKTEVQTGGFSKESILPKRNSDKLIARKKDWDPKKYGGFDSPTVAYSVLVVAKVEKGKSKKLKSVKELLGITIMERSSFEKNPIDFLEAKGYKEVKKDLIIKLPKYSLFELENGRKRMLASAGELQKGNELALPSKYVNFLYLASHYEKLKGSPEDNEQKQLFVEQHKHYLDEIIEQISEFSKRVILADANLDKVLSAYNKHRDKPIREQAENIIHLFTLTNLGAPAAFKYFDTTIDRKRYTSTKEVLDATLIHQSITGLYETRIDLSQLGGD

SEQ ID NO: 222 - protein, 1565 aa, synthetic construct
  REGION 1..1565: note = Synthetic polypeptide
SEVEFSHEYWMRHALTLAKRARDEREVPVGAVLVLNNRVIGEGWNRAIGLHDPTAHAEIMALRQGGLVMQNYRLYDATLYSTFEPCVMCAGAMIHSRIGRVVFGVRNAKTGAAGSLMDVLHHPGMNHRVEITEGILADECAALLCRFFRMPRRVFNAQKKAQSSTDSGGSSGGSSGSETPGTSESATPESSGGSSGGSDKKYSIGLAIGTNSVGWAVITDEYKVPSKKFKVLGNTDRHSIKKNLIGALLFDSGETAEATRLKRTARRRYTRRKNRICYLQEIFSNEMAKVDDSFFHRLEESFLVEEDKKHERHPIFGNIVDEVAYHEKYPTIYHLRKKLVDSTDKADLRLIYLALAHMIKFRGHFLIEGDLNPDNSDVDKLFIQLVQTYNQLFEENPINASGVDAKAILSARLSKSRRLENLIAQLPGEKKNGLFGNLIALSLGLTPNFKSNFDLAEDAKLQLSKDTYDDDLDNLLAQIGDQYADLFLAAKNLSDAILLSDILRVNTEITKAPLSASMIKRYDEHHQDLTLLKALVRQQLPEKYKEIFFDQSKNGYAGYIDGGASQEEFYKFIKPILEKMDGTEELLVKLNREDLLRKQRTFDNGSIPHQIHLGELHAILRRQEDFYPFLKDNREKIEKILTFRIPYYVGPLARGNSRFAWMTRKSEETITPWNFEEVVDKGASAQSFIERMTNFDKNLPNEKVLPKHSLLYEYFTVYNELTKVKYVTEGMRKPAFLSGEQKKAIVDLLFKTNRKVTVKQLKEDYFKKIECFDSVEISGVEDRFNASLGTYHDLLKIIKDKDFLDNEENEDILEDIVLTLTLFEDREMIEERLKTYAHLFDDKVMKQLKRRRYTGWGRLSRKLINGIRDKQSGKTILDFLKSDGFANRNFMQLIHDDSLTFKEDIQKAQVSGQGDSLHEHIANLAGSPAIKKGILQTVKVVDELVKVMGRHKPENIVIEMARENQTTQKGQKNSRERMKRIEEGIKELGSQILKEHPVENTQLQNEKLYLYYLQNGRDMYVDQELDINRLSDYDVDHIVPQSFLKDDSIDNKVLTRSDKNRGKSDNVPSEEVVKKMKNYWRQLLNAKLITQRKFDNLTKAERGGLSELDKAGFIKRQLVETRQITKHVAQILDSRMNTKYDENDKLIREVKVITLKSKLVSDFRKDFQFYKVREINNYHHAHDAYLNAVVGTALIKKYPKLESEFVYGDYKVYDVRKMIAKSEQEIGKATAKYFFYSNIMNFFKTEITLANGEIRKRPLIETNGETGEIVWDKGRDFATVRKVLSMPQVNIVKKTEVQTGGFSKESILPKRNSDKLIARKKDWDPKKYGGFDSPTVAYSVLVVAKVEKGKSKKLKSVKELLGITIMERSSFEKNPIDFLEAKGYKEVKKDLIIKLPKYSLFELENGRKRMLASAGELQKGNELALPSKYVNFLYLASHYEKLKGSPEDNEQKQLFVEQHKHYLDEIIEQISEFSKRVILADANLDKVLSAYNKHRDKPIREQAENIIHLFTLTNLGAPAAFKYFDTTIDRKRYTSTKEVLDATLIHQSITGLYETRIDLSQLGGD

SEQ ID NO: 223 - protein, 364 aa, synthetic construct
  REGION 1..364: note = Synthetic polypeptide
SEVEFSHEYWMRHALTLAKRAWDEREVPVGAVLVHNNRVIGEGWNRPIGRHDPTAHAEIMALRQGGLVMQNYRLIDATLYVTLEPCVMCAGAMIHSRIGRVVFGARDAKTGAAGSLMDVLHHPGMNHRVEITEGILADECAALLSDFFRMRRQEIKAQKKAQSSTDSGGSSGGSSGSETPGTSESATPESSGGSSGGSSEVEFSHEYWMRHALTLAKRARDEREVPVGAVLVLNNRVIGEGWNRAIGLHDPTAHAEIMALRQGGLVMQNYRLIDATLYVTFEPCVMCAGAMIHSRIGRVVFGVRNAKTGAAGSLMDVLHYPGMNHRVEITEGILADECAALLCYFFRMPRQVFNAQKKAQSSTD

SEQ ID NO: 224 - protein, 167 aa, synthetic construct
  REGION 1..167: note = Synthetic polypeptide
MSEVEFSHEYWMRHALTLAKRARDEREVPVGAVLVLNNRVIGEGWNRAIGLHDPTAHAEIMALRQGGLVMQNYRLYDATLYSTFEPCVMCAGAMIHSRIGRVVFGVRNAKTGAAGSLMDVLHHPGMNHRVEITEGILADECAALLCRFFRMPRRVFNAQKKAQSSTD

SEQ ID NO: 225 - protein, 167 aa, synthetic construct
  REGION 1..167: note = Synthetic polypeptide
MSEVEFSHEYWMRHALTLAKRARDEREVPVGAVLVLNNRVIGEGWNRAIGLHDPTAHAEIMALRQGGLVMQNYRLIDATLYVTFEPCVMCAGAMIHSRIGRVVFGVRNSKRGAAGSLMNVLNYPGMNHRVEITEGILADECAALLCDFYRMPRQVFNAQKKAQSSIN

SEQ ID NO: 226 - protein, 19 aa, synthetic construct
MKRTADGSEFESPKKKRKV

SEQ ID NO: 227 - protein, 21 aa, synthetic construct
SGGSKRTADGSEFEPKKKRKV

SEQ ID NO: 228 - protein, 7 aa, synthetic construct
PKKKRKV

SEQ ID NO: 229 - DNA, 2073 bp, Soybean chlorotic mottle virus
  source 1..2073: mol_type = other DNA
aatactgaaattgtccaaaaacaccgagttttaaccaaaggtaaccctaatgttactttcataaaagttagtataggcaaaagaaatttcttggcttatattgatactggagcaactctgtgctttggaaaaagaaaaatttcaaataattgggaaattttaaaacaaccaaaagaaattatcattgcagataaatcaaaacactatattagagaagctatttctaatgtgtttttaaaaatcgaaaataaagaattcttaatccctatcatatatttacatgattcaggattagatttaattataggaaacaatttcctaaaattataccaaccttttattcagagattggaaacaattgaattaagatggaaaaatcttaataacccaaaagaatctcaaatgatttcaaccaagattcttacaaaaaatgaagtattaaaactttcatttgaaaaaattcatatttgtttagaaaaatatttatttttcaaaacaattgaagaacaactcgaagaagtatgttcagaacatccactggatgaaacaaaaaataaaaatggtcttttaatagaaataagacttaaagacccattacaagaaataaatgtcacaaatagaattccatatacaataagagatgtacaagaattcaaggaggaatgtgaagacctcttaaaaaagggcttaattcgagaatctcaaagtccacacagtgcaccggcattctatgtcgaaaatcacaatgaaatcaagcgtggaaaaagacgcatggtaattaattacaaaaaaatgaatgaagccacaattggcgattcatataagttaccaagaaaagattttattctggaaaaaataaaaggatctttatggttttcaagcttggatgctaaatctggatactaccagctaaggctccatgaaaatacaaagcctctaacagctttttcatgtccacctcagaaacattacgaatggaatgttttaagttttggacttaaacaagcaccatctatatatcaaagatttatggatcaatccctcaagggacttgaacatatatgtttggcatatattgatgacatcctgatctttacaaaaggatctaaagaacaacatgtaaatgatgttcggattgttttgcaaagaatcaaagaaaaaggaattattatttctaagaaaaaatcaaaactgattcaacaggaaatcgaatatctcggtttaaaaatacaagggaatggagaaattgatttatcacctcatacccaagaaaaaattcttcaatttcctgatgaattagaagatagaaaacaaatacagcgttttcttggctgtattaattacattgcaaatgaaggatttttcaaaaatcttgctctagaaagaaagcaccttcaaaagaaaatttctgttaaaaacccctggaaatgggatacaatagatacaaaaatggttcagtccataaaaggcaaaattcaaagcctaccaaaattatataatgcatcgattcaagactttttaatagtcgagacagatgcatcgcaacactcctggagtggatgtttgcgagctttacccaagggaaagcaaaaaatcggactcgatgaattcgggataccgacagctgacctctgcacaggtagcagttcagcttcaagcgataattcgccagctgagattgacaaatgtcattcagccagtaaacaggacactcatgtggccagtaaaataaagaaactcgaaaacgagcttctactttgcaaatatgtttcaggtaccttcacagatacggaaacaagataccctatagcagaactggaggttcttgctggagtaaaagtcctagaaaaatggagaatcgacctcctacaaacgaggttcctcctccgcactgacagcaagtactttgcaggtttttgtaggtacaacatcaagacagactaccggaacggacgtctaatcaggtggcaactacggttacaagcctatcaaccgtacgtggaattaatcaaatcagaaaataacccattcgcagatacgcttacgcgagaatggagcaagccatcaagcagt

SEQ ID NO: 230 - DNA, 2034 bp, Cauliflower mosaic virus
  source 1..2034: mol_type = other DNA
gatcatctacttctgaagactcagactcagactgagcaggtgatgaacgtcaccaatcccaattcgatctacatcaagggaagactctacttcaagggatacaagaagatagaacttcactgtttcgtagacacgggagcaagcctatgcatagcatccaagttcgtcataccagaagaacattgggtcaatgcagaaagaccaattatggtcaaaatagcagatggaagctcaatcaccatcagcaaagtctgcaaagacatagacttgatcatagccggcgagatattcagaattcccaccgtctatcagcaagaaagtggcatcgatttcattatcggcaacaacttctgtcagctgtatgaaccattcatacagtttacggatagagttatcttcacaaagaacaagtcttatcctgttcatattgcgaagctaaccagagcagtgcgagtaggcaccgaaggatttcttgaatcaatgaagaaacgttcaaaaactcaacaaccagagccagtgaacatttctacaaacaagatagaaaatccactagaagaaattgctattctttcagaggggaggaggttatcagaagaaaaactctttatcactcaacaaagaatgcaaaaaatcgaagaactacttgagaaagtatgttcagaaaatccattagatcctaacaagactaagcaatggatgaaagcttctatcaagctcagcgacccaagcaaagctatcaaggttaaacccatgaagtatagcccaatggatcgcgaagaatttgacaagcaaatcaaagaattactggacctaaaagtcatcaagcccagtaaaagccctcacatggcaccagccttcttggtcaacaatgaagccgagaagcgaagaggaaagaaacgtatggtagtcaactacaaagctatgaacaaagctactgtaggagatgcctacaatcttcccaacaaagacgagttacttacactcattcgaggaaagaagatcttctcttccttcgactgtaagtcaggattctggcaagttctgctagatcaagaatcaagacctctaacggcattcacatgtccacaaggtcactacgaatggaatgtggtccctttcggcttaaagcaagctccatccatattccaaagacacatggacgaagcatttcgtgtgttcagaaagttctgttgcgtttatgtcgacgacattctcgtattcagtaacaacgaagaagatcatctacttcacgtagcaatgatcttacaaaagtgtaatcaacatggaattatcctttccaagaagaaagcacaactcttcaagaagaagataaacttccttggtctagaaatagatgaaggaacacataagcctcaaggacatatcttggaacacatcaacaagttccccgatacccttgaagacaagaagcaacttcagagattcttaggcatactaacatatgcctcggattacatcccgaagctagctcaaatcagaaagcctctgcaagccaagcttaaagaaaacgttccatggagatggacaaaagaggataccctctacatgcaaaaggtgaagaaaaatctgcaaggatttcctccactacatcatcccttaccagaggagaagctgatcatcgagaccgatgcatcagacgactactggggaggtatgttaaaagctatcaaaattaacgaaggtactaatactgagttaatttgcagatacgcatctggaagctttaaagctgcagaaaagaattaccacagcaatgacaaagagacattggcggtaataaatactataaagaaatttagtatttatctaactcctgttcattttctgattaggacagataatactcatttcaagagtttcgttaatctcaattacaaaggagattcgaaacttggaagaaacatcagatggcaagcatggcttagccactattcatttgatgttgaacacattaaaggaaccgacaaccactttgcggacttcctttcaagagaattcaataaggttaattcc

SEQ ID NO: 231 - protein, 683 aa, Moloney Murine Leukemia Virus
TLNIEDEHRLHETSKEPDVSLGSTWLSDFPQAWAETGGMGLAVRQAPLIIPLKATSTPVSIKQYPMSQEARLGIKPHIQRLLDQGILVPCQSPWNTPLLPVKKPGTNDYRPVQDLREVNKRVEDIHPTVPNPYNLLSGLPPSHQWYTVLDLKDAFFCLRLHPTSQPLFAFEWRDPEMGISGQLTWTRLPQGFKNSPTLFDEALHRDLADFRIQHPDLILLQYVDDLLLAATSELDCQQGTRALLQTLGNLGYRASAKKAQICQKQVKYLGYLLKEGQRWLTEARKETVMGQPTPKTPRQLREFLGTAGFCRLWIPGFAEMAAPLYPLTKTGTLFNWGPDQQKAYQEIKQALLTAPALGLPDLTKPFELFVDEKQGYAKGVLTQKLGPWRRPVAYLSKKLDPVAAGWPPCLRMVAAIAVLTKDAGKLTMGQPLVILAPHAVEALVKQPPDRWLSNARMTHYQALLLDTDRVQFGPVVALNPATLLPLPEEGLQHNCLDILAEAHGTRPDLTDQPLPDADHTWYTDGSSLLQEGQRKAGAAVTTETEVIWAKALPAGTSAQRAELIALTQALKMAEGKKLNVYTDSRYAFATAHIHGEIYRRRGLLTSEGKEIKNKDEILALLKALFLPKRLSIIHCPGHQKGHSAEARGNRMADQAARKAAITETPDTSTLLIENSSPNSRLIN

SEQ ID NO: 232 - protein, 717 aa, Moloney Murine Leukemia Virus
MKRTADGSEFESPKKKRKVTLNIEDEHRLHETSKEPDVSLGSTWLSDFPQAWAETGGMGLAVRQAPLIIPLKATSTPVSIKQYPMSQEARLGIKPHIQRLLDQGILVPCQSPWNTPLLPVKKPGTNDYRPVQDLREVNKRVEDIHPTVPNPYNLLSGLPPSHQWYTVLDLKDAFFCLRLHPTSQPLFAFEWRDPEMGISGQLTWTRLPQGFKNSPTLFNEALHRDLADFRIQHPDLILLQYVDDLLLAATSELDCQQGTRALLQTLGNLGYRASAKKAQICQKQVKYLGYLLKEGQRWLTEARKETVMGQPTPKTPRQLREFLGKAGFCRLFIPGFAEMAAPLYPLTKPGTLFNWGPDQQKAYQEIKQALLTAPALGLPDLTKPFELFVDEKQGYAKGVLTQKLGPWRRPVAYLSKKLDPVAAGWPPCLRMVAAIAVLTKDAGKLTMGQPLVILAPHAVEALVKQPPDRWLSNARMTHYQALLLDTDRVQFGPVVALNPATLLPLPEEGLQHNCLDILAEAHGTRPDLTDQPLPDADHTWYTDGSSLLQEGQRKAGAAVTTETEVIWAKALPAGTSAQRAELIALTQALKMAEGKKLNVYTDSRYAFATAHIHGEIYRRRGWLTSEGKEIKNKDEILALLKALFLPKRLSIIHCPGHQKGHSAEARGNRMADQAARKAAITETPDTSTLLIENSSPSGGSKRTADGSEFEPKKKRKV

SEQ ID NO: 233 - protein, 683 aa, synthetic construct
TLNIEDEHRLHETSKEPDVSLGSTWLSDFPQAWAETGGMGLAVRQAPLIIPLKATSTPVSIKQYPMSQEARLGIKPHIQRLLDQGILVPCQSPWNTPLLPVKKPGTNDYRPVQDLREVNKRVEDIHPTVPNPYNLLSGLPPSHQWYTVLDLKDAFFCLRLHPTSQPLFAFEWRDPEMGISGQLTWTRLPQGFKNSPTLFNEALHRDLADFRIQHPDLILLQYVDDLLLAATSELDCQQGTRALLQTLGNLGYRASAKKAQICQKQVKYLGYLLKEGQRWLTEARKETVMGQPTPKTPRQLREFLGKAGFCRLFIPGFAEMAAPLYPLTKPGTLFNWGPDQQKAYQEIKQALLTAPALGLPDLTKPFELFVDEKQGYAKGVLTQKLGPWRRPVAYLSKKLDPVAAGWPPCLRMVAAIAVLTKDAGKLTMGQPLVILAPHAVEALVKQPPDRWLSNARMTHYQALLLDTDRVQFGPVVALNPATLLPLPEEGLQHNCLDILAEAHGTRPDLTDQPLPDADHTWYTDGSSLLQEGQRKAGAAVTTETEVIWAKALPAGTSAQRAELIALTQALKMAEGKKLNVYTDSRYAFATAHIHGEIYRRRGWLTSEGKEIKNKDEILALLKALFLPKRLSIIHCPGHQKGHSAEARGNRMADQAARKAAITETPDTSTLLIENSSPNSRLIN

SEQ ID NO: 234 - DNA, 2031 bp, synthetic construct
  misc_feature 1..2031: note = MMLV_MO1
  source 1..2031: mol_type = other DNA
accctgaacatcgaggacgagtatcggcttcatgagaccagcaaagagccggacgtctccctgggaagcacctggctgagcgacttcccgcaagcctgggcggagaccggtggtatggggctcgcagtgcggcaagcgccgttgataatcccgctaaaggccacgagcacgcccgtgtctatcaagcagtacccgatgagtcaagaggcacgcctcggtatcaagccgcatatccagcgcctcctggaccagggcatcctcgtgccctgccagtctccctggaatacgcctctgctacccgtcaagaagcctggcaccaacgattacaggccggtgcaagacctgcgtgaggtcaacaagcgcgtggaggacatccacccaacggtgcccaacccgtacaatctcctatctggccttccgccctcgcaccagtggtacacggtcttggacctaaaggacgcattcttctgtctgaggctgcaccctacgtcccagccgctgttcgccttcgagtggcgcgacccggagatgggcatctctggccagctaacttggacgcgattgccccaggggtttaagaactcgcccacactcttcaacgaggcactccaccgtgacctggccgactttcgcatacagcaccccgaccttatcctgttgcagtacgtcgatgacctgctcctggcggccacgtccgagctggactgccagcaaggcacccgcgccctacttcaaaccctgggcaacctgggttaccgtgcgtccgccaagaaggcccaaatctgccaaaagcaagtcaagtacctcggctacctcttgaaggagggacagcgctggctgacggaggcgaggaaggagacggtgatgggtcagcccacacccaagaccccgaggcagctaagggagttcctggggaaggcgggcttctgccgtctattcatccctggcttcgcggagatggcggccccgctgtacccgctaacgaagccgggcacgctgttcaactggggccctgaccagcagaaggcgtaccaggagatcaagcaagcgttgcttactgccccagcactcggcctccccgacctcacaaagccgttcgagctattcgttgacgagaaacagggctacgcgaagggtgtgctgactcaaaagctagggccgtggcgacgcccagtagcctacctgagcaagaagctcgaccccgtggcggcgggctggccaccatgcctccggatggtcgcggctatcgcggtgctcacaaaggatgcggggaagctcacgatggggcagcccctggtgatcctggccccacacgcggtggaggcgttagtgaagcaacctcccgaccgatggctgagcaacgcccgcatgacccactaccaggcgctcctcctcgacaccgaccgcgtgcaattcggccctgtcgtggcactgaacccggccacgctgctcccactgcccgaggaggggctacagcacaactgcctcgatatactggcggaagcccacggcacccgccccgacttgacggaccagccgcttcccgacgcggaccatacgtggtacaccgacgggagttccttactccaagagggccagcgaaaggcgggcgctgcggtgaccactgagacggaagtaatctgggcaaaggcgctgcctgcgggcacgtctgcccagcgggcggagctgatcgccctgacccaggccctcaagatggccgagggcaagaagctgaacgtttacaccgacagtcggtatgccttcgcaactgcccacatccacggcgaaatctaccgtcggcgcggctggctgacgagcgagggcaaggagatcaagaacaaggacgagatcctcgccctgctaaaggcactcttcctgcccaagcgactgtccatcattcactgtccggggcaccagaagggccattccgccgaggcgcggggcaaccgcatggcggatcaggccgctcggaaggcggcgatcaccgagacgcccgatacgagcacgctcctgattgaaaactcgtcgccg

SEQ ID NO: 235 - DNA, 2031 bp, synthetic construct
  misc_feature 1..2031: note = MMLV_MO2
  source 1..2031: mol_type = other DNA
accctgaacattgaggacgagtatcgcctgcacgagaccagcaaggagcccgacgtgagcctcggctcaacgtggctcagtgacttcccacaagcctgggccgagactggtggaatggggctggccgtgcgccaagctcccctcatcattcctctcaaggccacttcgacgcctgtctccatcaagcagtaccccatgtcccaggaggctaggctgggcatcaagccgcacatccaacgcctgttagatcaaggaatactggtcccctgccagtcgccgtggaatactccgctactgcctgtcaagaagccgggcacgaacgactaccggcctgtccaagacctgcgcgaggtgaacaagcgggtcgaggacattcaccccaccgttcccaacccttacaacctattgtctggcctcccaccgagccatcagtggtacaccgtcctggacctcaaggatgcgttcttctgtctgcggctacaccctacgtcgcaaccactcttcgccttcgagtggcgggatccggagatggggatctcggggcagctcacgtggactcggctgcctcaggggttcaagaactccccaacactctttaacgaggcactgcatcgggatctggccgacttccgtatccagcacccagacctcatcctcctacagtacgtggacgacttgctgctggccgcgaccagcgagctggactgccagcaagggacacgcgcgctgctccagacgctcgggaacctgggataccgcgccagcgctaagaaggctcaaatctgtcagaaacaagtgaagtacctgggttacctgctcaaggagggtcagcgttggcttaccgaggcccgcaaggagaccgtgatggggcaacccacgccaaagacgccccgacagctacgcgagttcctgggcaaggctgggttctgtcggttgttcatccccggtttcgctgagatggccgcccctctctacccgctgacgaaacctgggactctgttcaactggggccctgaccagcagaaggcgtaccaggagatcaagcaagcgctgcttaccgccccggcgctcggattgccggaccttaccaagcccttcgagctgttcgtggacgagaagcaaggttacgcgaagggcgtcctgacacaaaagttggggccctggcgtaggccggtcgcctacctcagcaagaagttggaccccgtggcggcgggctggccgccgtgcctccgtatggtggcagccatcgccgttctcaccaaagacgctggcaagctcacgatggggcagcctctggtgatcctggcaccccatgccgtcgaggcgctcgtgaagcagccgcctgaccgctggctgagtaacgcacggatgacccattaccaagccctattgctagacacggatcgcgtccaatttgggcccgtggtggctctgaaccctgccactctccttcccctccctgaggagggcttgcagcataactgcctggacatactggctgaggcccacgggacaaggccggacctaacggaccagcctctaccggacgcggatcacacatggtacaccgacggctcctctctcctacaagaggggcagcggaaggcgggtgccgccgtcaccacggagacggaggtgatctgggctaaggcactgcccgccgggacttcggcacagcgagccgagctaatagccctcacacaagcgctgaaaatggccgagggcaagaagctaaacgtctatacggactcccgatacgctttcgccaccgcccacattcatggcgaaatctaccgccgccgtggctggctgacgtccgagggcaaggagatcaagaacaaggacgagatcctcgccctcctgaaagccctgttcctgccgaaaaggctttcgataatccactgccccggccaccagaaggggcactccgccgaggcacgcggcaaccgtatggccgaccaggccgcccggaaggcggcgatcacggaaaccccggacacatccacgctcctcatcgagaacagcagcccc

SEQ ID NO: 236 - DNA, 2031 bp, synthetic construct
  misc_feature 1..2031: note = MMLV_MO3
  source 1..2031: mol_type = other DNA
accctcaacatcgaggacgagtaccgtctgcacgagacgtcgaaggagccggatgtctcactcggctccacgtggctcagcgacttcccacaggcgtgggcggagaccggtggcatgggactggcggtgcgacaagcgccccttatcattcccctaaaggcgacgtcaactcctgtttccattaagcagtaccctatgtcccaggaggcccggctcggcatcaagccacacatccaacggctattggaccagggtatcttggtgccgtgccaatccccgtggaacactccccttctacccgtcaagaagccaggcaccaacgactaccgccccgtgcaagacctgcgcgaggtcaacaagcgagtggaggacatccatcctaccgtcccgaacccgtacaacctgctttccggcctcccgccctcgcaccagtggtacaccgttctcgacttgaaggacgcattcttctgtctgcgcctccacccaacgagccagcccctcttcgctttcgagtggcgcgacccggagatgggaatttcgggccagcttacatggacccgcctcccacaggggttcaagaacagcccgacgctgttcaacgaggccctgcaccgcgacttggcagacttccgaatccagcatcccgacctaatcctcctgcaatacgttgacgacttattgctggccgcgaccagcgagcttgactgccagcaagggactcgcgcgcttctacagacgctcgggaacctgggctaccgtgcctcagctaagaaggcccagatttgccagaagcaagttaagtatctcggctacctcctcaaggagggacagcggtggctgacggaggcccgcaaggagacggtcatgggccagccaacaccgaaaacgcccagacaactccgcgagttcctcggcaaagcgggcttctgtcggctgtttatccccggcttcgccgagatggccgcgcccctctacccactgacgaaacccggcaccctgttcaactggggcccggatcagcagaaggcgtatcaggagatcaagcaagcactcctgacagccccggccctgggattgcccgaccttacgaagcccttcgagttattcgtggacgagaagcaaggctatgcgaagggtgtcctcacgcagaagctggggccctggaggcggcccgtcgcgtacctaagcaagaagctcgacccagtggcggcgggttggccgccctgcctccgcatggtggccgcgattgcggttctcacaaaggacgccgggaagctcacgatggggcagccacttgtcatcctcgctccgcacgccgtggaggcactggtgaagcagccgccggatcgctggctgtctaatgctcgcatgacccactatcaggcgctgctcctagacactgacagggttcagttcggccccgttgtcgcgcttaaccccgctacactactcccgctgccggaggagggtttgcagcataactgcctcgacatcctcgccgaggcccacggcacgcgacccgacctaacggaccagccgctgccggacgctgaccacacttggtacaccgacggcagctccctcctgcaagagggacagcggaaggccggtgccgccgtgacgacggagacggaggtgatatgggctaaggccctgcccgctggtacgtccgcccagcgagccgagctgatcgccctgacgcaagccctcaagatggccgagggcaagaagctaaacgtctatacggacagccgctacgcattcgccacagcccacattcacggagagatataccggaggcgcggctggcttacgtccgaaggcaaggagattaagaacaaagatgagattctggcgctgttgaaggccctcttcctccccaagcggctttccatcatacactgtccaggccaccagaagggccactcggcggaggcgcggggcaaccggatggccgaccaggcggcgcgcaaagccgcgatcacggagaccccagacacttccacgctcctgatcgagaacagtagcccc

SEQ ID NO: 237 - DNA, 2031 bp, synthetic construct
  misc_feature 1..2031: note = MMLV_DO1
  source 1..2031: mol_type = other DNA
actttgaatatcgaagatgagtaccggctacatgagacgtctaaggagcctgatgtttcactcgggagcacttggctaagcgatttcccacaagcgtgggctgaaacgggcgggatgggcctcgctgtaagacaagcgccacttatcatcccgcttaaagctacttctactcccgtctctattaagcaatacccaatgtcccaggaagctcgtttgggcattaagcctcatatacaaaggctactcgatcagggcatacttgttccctgccaatcaccgtggaatacgcccctattaccagttaagaagcctgggactaacgactatcgccccgtacaggatctacgtgaggtgaacaagcgtgtagaggacatccatccgaccgttccgaatccatacaatttgctttctggattacctccaagtcatcaatggtacaccgtgctggatctcaaggacgcattcttctgtctaagattacatcctactagccagccacttttcgcattcgagtggcgagatcccgagatgggaatttcgggccagcttacatggacgaggcttcctcaaggcttcaagaactctcctaccttgttcaatgaggctctacaccgcgacctcgcagacttccggatacaacatccggacctcatactcctacaatatgtggacgatctattgctggccgcgacgagcgaattggattgtcagcaaggaacccgcgccttgttacaaacgttggggaacttggggtatcgagcatcagccaagaaggcacaaatctgccagaaacaagtgaagtatttggggtacttactgaaagaggggcaacgatggttgaccgaagctcgcaaggaaactgttatgggccagccgacacctaagactccaagacagctccgagagttcctcggcaaggctgggttctgtcgcctattcattcctgggtttgccgaaatggctgctcctctgtacccgttgaccaaaccgggaaccttgttcaattggggaccagatcaacagaaggcgtatcaggagatcaagcaagcgctgttgactgcgcctgcgttgggcttgccggatttgacaaaaccctttgaacttttcgttgacgagaaacaaggttacgcgaagggagttcttacacaaaagctgggcccctggagacgacctgttgcttatcttagcaagaagttagatcccgttgctgcggggtggccgccctgcttgaggatggttgccgccattgcggttctgactaaagatgcgggcaaattgacgatgggccagccgctcgtaattctcgccccgcacgcagtcgaagccctagtgaagcagcctcctgaccgttggctctccaacgctcggatgacccactatcaagcgctgctgttggataccgatagagttcaattcgggccggtcgtagcgctcaatcccgcaacgctattacccctgcctgaggagggactacaacataactgcttggatattctagcggaggctcatgggacaagacctgacttgacagatcagcccttgccagatgccgaccacacatggtacactgacggctcatcacttctacaagagggccaaaggaaggccggagctgcggtgacgactgaaaccgaggtgatctgggcaaaggctttacccgctggaacttctgctcagcgcgcagagcttatcgccctaactcaagccctgaaaatggctgagggcaagaagttgaatgtctataccgattcacggtatgctttcgctaccgcccacattcatggagaaatctatcggcgacgaggttggctcacgtctgaggggaaggagattaagaacaaggacgaaatcttagctctgctgaaagctctattcttacccaaacgcttgtcgattatccactgcccaggacaccaaaagggccattccgccgaagccaggggaaaccgtatggccgatcaagctgcccggaaggctgcaataaccgaaacccctgacacttccacgctactcatcgaaaactctagccca

SEQ ID NO: 238 - DNA, 2031 bp, synthetic construct
  misc_feature 1..2031: note = MMLV_DO2
  source 1..2031: mol_type = other DNA
accttgaatatcgaagatgagtacagactccatgagaccagcaaggagcctgatgtgagcctgggaagtacatggctatctgactttcctcaggcttgggcggagaccggtggcatgggcctggctgtccggcaagcacccctaatcatcccgttgaaagcaacgtccacacccgtatctatcaagcagtacccgatgagccaagaggcacggctagggattaagccgcacatccaaagattgttagaccaggggatactcgttccctgtcaatctccgtggaacacaccgttactgcctgttaagaagcccggcacaaatgattatcggcctgtacaagacctgcgcgaagtgaacaaacgagtggaagatattcaccccaccgtgccgaatccttacaacttgctaagcggtttaccacccagtcaccagtggtacaccgtcttggacctcaaagacgcattcttctgcttgcggttgcatcctacgagtcagccgctctttgcctttgaatggagagatcccgagatgggcataagtggtcagcttacatggacgaggctacctcagggattcaagaactcgcctaccttattcaatgaggctctacacagggatcttgctgactttcggatacaacaccctgacttaattctgctacaatatgttgacgatctgctgcttgcggcgaccagtgaactcgactgccaacaagggacaagagccttgttacagacacttggcaatctcggctaccgcgcgtctgctaagaaggcacagatttgccaaaagcaagtgaagtatctcggttacctgctgaaagagggacaaagatggttgaccgaagccaggaaggaaactgtcatggggcaacccacccctaaaaccccaagacagcttagagagttcctcgggaaagctgggttctgccgcctgttcattcccggtttcgctgaaatggctgcacctctatacccactgaccaaaccgggcacgctattcaattggggaccggatcaacaaaaggcttaccaggagatcaagcaagctctattgacagctccggctctgggtttacccgacttgactaaacccttcgagttgttcgttgacgagaaacagggctacgcgaaaggcgtactgacgcagaaactgggcccgtggcggcgacccgttgcttacctttccaagaagctggaccctgttgccgctggctggccgccctgccttcgcatggttgcggccattgctgtccttacgaaagatgctgggaaactaactatgggtcagccgctcgtaattctcgcgccacacgctgtcgaggctctagtcaaacaacctcctgaccgctggctgtcgaatgcacggatgacacattaccaggcgttgctattggacactgaccgagtacaatttggaccagtagtggctttaaatcccgcgacactccttccccttcctgaggagggtttgcaacacaactgtcttgatatacttgctgaggcccacggaacaagacccgatctcacagatcaacccctccccgacgcagatcacacctggtacaccgacggttcaagcctgttacaggaaggccagcgaaaggccggagcagccgtgacaaccgaaaccgaagttatctgggcaaaggccctaccagccgggacaagcgcgcagagggccgagctgatcgcgctcacacaagcactcaaaatggccgaaggcaagaagctcaatgtttacactgattcccgctacgcattcgctaccgctcatattcacggagaaatctacaggaggcgagggtggcttactagcgaaggaaaggagattaagaacaaagacgagatcctggcactattgaaagccttgttcctgccaaagcgcttatctatcattcactgtccgggccaccagaagggccacagtgctgaggctcggggcaatcggatggcagatcaggccgcacgaaaagccgcaattactgagacacctgacacatctaccttgctgattgagaactcgtctccg

SEQ ID NO: 239 - DNA, 2073 bp, synthetic construct
  misc_feature 1..2073: note = SbCMV_DO1
  source 1..2073: mol_type = other DNA
aacactgagattgttcaaaaacatagagtgcttaccaaaggaaatccaaatgttacatttataaaagtgtccatagggaagagaaattttttagcttatattgacactggagccacactctgttttggaaaaaggaaaatatcaaataactgggaaatccttaagcaacccaaagaaatcattatcgctgataagtcaaaacactacatcagagaagctataagtaacgtattcctgaaaattgaaaacaaggagttcttgatacccattatatatcttcatgattcagggttggatttgattattgggaataacttcctgaagctttatcaaccatttattcaaagacttgaaactatcgaactcaggtggaaaaacttgaacaatcccaaagagtctcaaatgattagcactaaaattcttacgaaaaatgaagttcttaagctgagttttgagaagattcatatttgtctcgaaaaataccttttctttaaaaccatcgaggaacaacttgaggaggtttgttctgaacatccacttgatgagacaaagaacaagaatggtcttttgattgagatacgtctgaaagatcctctgcaggagattaacgtcacaaataggattccatataccattagagatgtacaggaattcaaggaagaatgtgaagatttacttaagaagggtctcattcgtgaatcacaatctccccacagtgcacccgcattttacgttgaaaatcataatgaaattaagagaggcaagcgtagaatggttatcaactacaagaagatgaatgaagcaaccataggagatagctacaaactcccgcgaaaggattttatcttagagaagataaagggcagtttgtggttttcaagtttagatgcaaaatcaggttattatcagcttcgcttacatgagaacacaaagcctctcactgctttctcttgccctcctcaaaaacattatgaatggaatgtgttgagtttcggtctaaaacaggcaccttcgatttaccagcgcttcatggaccagtccttaaagggattagagcacatttgcttggcatatatagatgatatcttaatctttactaaaggctcaaaggaacagcatgtcaatgatgttcggattgtcctgcaaagaataaaagagaaaggaatcataatatctaaaaaaaaatcaaaattgattcagcaagagattgaatatctaggattgaaaattcaaggtaatggtgaaattgacctctcaccacatactcaagaaaagatcctacagttccctgatgaactggaggatagaaaacaaatacagaggtttctaggttgcattaattacattgcgaacgaaggatttttcaaaaatcttgccctagagagaaagcacttgcagaagaagatttccgtgaagaatccatggaagtgggatacaatagacacaaaaatggtgcaatcaatcaagggcaaaattcaatccctgccgaagctctacaatgcaagtattcaggatttcctaattgtagagactgacgcctcgcaacattcttggtctgggtgtttgcgggctcttccaaagggcaagcagaaaatcggtctggacgaatttgggattccaacggcagatttatgtactggtagctccagtgcttcctctgataattctcctgctgagatcgacaagtgccactcagcctcgaagcaggatacacacgtcgcctctaaaataaagaaacttgagaatgagttacttttgtgcaagtatgtttcagggactttcacggacaccgagactaggtatcctatagctgaactcgaggtgttggcgggtgttaaagttttggaaaaatggaggatagacttgttgcaaacacgatttctacttaggacagattccaaatattttgctggattttgtagatacaacattaagactgattatcggaacgggaggctcataagatggcaattgcgccttcaagcttaccagccttatgtggaactgatcaagagtgaaaataatccttttgcagacaccctaacacgagagtggagcaaaccatcttctagc

SEQ ID NO: 240 - DNA, 2034 bp, synthetic construct
  misc_feature 1..2034: note = CaMV_DO1
  source 1..2034: mol_type = other DNA
gatcaccttctgcttaagacacagacacaaactgaacaagttatgaatgtgaccaacccgaattccatttacattaagggacgactctactttaaggggtataagaaaatagaattacattgtttcgtcgacactggagcatctctctgcatagcgtccaagtttgttattcctgaggaacattgggtaaatgcagaaaggccgattatggttaaaattgcagatggtagcagcatcacaatctcaaaagtttgcaaggacattgacttgatcattgctggtgagattttcagaattcctacagtgtatcaacaagaatccggcattgattttataattggtaataacttttgtcaactttatgagcccttcatacaatttacagatcgagtcatttttactaaaaacaagagttaccctgttcacattgcaaaactcactcgtgccgtgagagttggaacggaaggatttctagaatctatgaagaagagatcgaaaactcagcaaccagaacccgttaatatttctacaaataagattgaaaatccattagaggaaatagccatcttgtccgaaggccggcggttgagtgaagaaaagttgtttatcacgcagcagagaatgcaaaaaatagaggagcttctcgaaaaggtttgttctgagaatcctttggatccaaataaaacaaaacaatggatgaaagctagtataaagctttcagacccatcaaaggcaattaaggtgaagccaatgaaatatagccccatggatagggaggagtttgacaagcaaattaaggagctactcgatctgaaagtaataaaaccttctaaatcgcctcacatggctccagcattcctggttaacaacgaggctgaaaagcgcagaggaaaaaaaagaatggtggtgaactacaaagcaatgaataaggctactgttggagatgcttataatcttcctaataaagatgagctcttgaccttaattagagggaagaaaattttctcctcatttgattgtaaatcaggattttggcaagtgttgctggatcaagagtctcgtccactgaccgcctttacgtgccctcaaggacattatgaatggaatgtcgtaccatttggtctcaagcaagcaccttctattttccagaggcatatggatgaagcatttagagtgtttaggaaattctgctgtgtttatgtggatgatatattggtattctcaaataatgaggaagaccatttgctgcatgttgccatgattcttcagaagtgcaatcaacatggaatcatcttatccaagaagaaggctcagttgttcaagaagaagataaattttttgggtctcgagattgatgaggggacacataagcctcagggtcatatactagaacatatcaacaagtttccagacactttggaagacaaaaagcagttgcaaaggttccttgggattctgacttatgcttcagattatataccaaagcttgctcaaataagaaaaccccttcaggcgaagctcaaagaaaacgttccttggaggtggactaaggaggataccttatacatgcagaaagtcaagaaaaacctccagggtttcccaccgctccaccatcctttacctgaagaaaaactaattatcgagacagatgcttctgatgactactggggcggcatgttgaaggccatcaaaatcaatgaagggaccaatactgagctcatttgtcgatatgcaagcggaagttttaaagcagctgagaaaaattatcatagtaatgataaagagactctagccgttattaacaccataaagaaattctctatatatcttacccccgtccactttttaatcaggacagacaacactcacttcaaatcatttgtgaacctgaattacaagggtgatagtaaacttggccgtaacatacgctggcaggcttggttgagccactactcttttgatgtagaacacattaaaggaacagataatcattttgctgatttcctttctcgcgagttcaacaaagtaaattca

SEQ ID NO: 241 - protein, 21 aa, Human herpesvirus 8
APPGMRLRSGRSTGAPLTRGS

SEQ ID NO: 242 - protein, 34 aa, Homo sapiens
EPEEERIRYSQRLRGTMRRRYEDDGISDDEIEGK

SEQ ID NO: 243 - protein, 1858 aa, synthetic construct
MKRTADGSEFESPKKKRKVSEVEFSHEYWMRHALTLAKRAWDEREVPVGAVLVHNNRVIGEGWNRPIGRHDPTAHAEIMALRQGGLVMQNYRLIDATLYVTLEPCVMCAGAMIHSRIGRVVFGARDAKTGAAGSLMDVLHHPGMNHRVEITEGILADECAALLSDFFRMRRQEIKAQKKAQSSTDSGGSSGGSSGSETPGTSESATPESSGGSSGGSSEVEFSHEYWMRHALTLAKRARDEREVPVGAVLVLNNRVIGEGWNRAIGLHDPTAHAEIMALRQGGLVMQNYRLIDATLYVTFEPCVMCAGAMIHSRIGRVVFGVRNAKTGAAGSLMDVLHYPGMNHRVEITEGILADECAALLCYFFRMPRQVFNAQKKAQSSTDSGGSSGGSSGSETPGTSESATPESSGGSSGGSDKKYSIGLAIGTNSVGWAVITDEYKVPSKKFKVLGNTDRHSIKKNLIGALLFDSGETAEATRLKRTARRRYTRRKNRICYLQEIFSNEMAKVDDSFFHRLEESFLVEEDKKHERHPIFGNIVDEVAYHEKYPTIYHLRKKLVDSTDKADLRLIYLALAHMIKFRGHFLIEGDLNPDNSDVDKLFIQLVQTYNQLFEENPINASGVDAKAILSARLSKSRRLENLIAQLPGEKKNGLFGNLIALSLGLTPNFKSNFDLAEDAKLQLSKDTYDDDLDNLLAQIGDQYADLFLAAKNLSDAILLSDILRVNTEITKAPLSASMIKRYDEHHQDLTLLKALVRQQLPEKYKEIFFDQSKNGYAGYIDGGASQEEFYKFIKPILEKMDGTEELLVKLNREDLLRKQRTFDNGSIPHQIHLGELHAILRRQEDFYPFLKDNREKIEKILTFRIPYYVGPLARGNSRFAWMTRKSEETITPWNFEEVVDKGASAQSFIERMTNFDKNLPNEKVLPKHSLLYEYFTVYNELTKVKYVTEGMRKPAFLSGEQKKAIVDLLFKTNRKVTVKQLKEDYFKKIECFDSVEISGVEDRFNASLGTYHDLLKIIKDKDFLDNEENEDILEDIVLTLTLFEDREMIEERLKTYAHLFDDKVMKQLKRRRYTGWGRLSRKLINGIRDKQSGKTILDFLKSDGFANRNFMQLIHDDSLTFKEDIQKAQVSGQGDSLHEHIANLAGSPAIKKGILQTVKVVDELVKVMGRHKPENIVIEMARENQTTQKGQKNSRERMKRIEEGIKELGSQILKEHPVENTQLQNEKLYLYYLQNGRDMYVDQELDINRLSDYDVDHIVPQSFLKDDSIDNKVLTRSDKNRGKSDNVPSEEVVKKMKNYWRQLLNAKLITQRKFDNLTKAERGGLSELDKAGFIKRQLVETRQITKHVAQILDSRMNTKYDENDKLIREVKVITLKSKLVSDFRKDFQFYKVREINNYHHAHDAYLNAVVGTALIKKYPKLESEFVYGDYKVYDVRKMIAKSEQEIGKATAKYFFYSNIMNFFKTEITLANGEIRKRPLIETNGETGEIVWDKGRDFATVRKVLSMPQVNIVKKTEVQTGGFSKESILPKRNSDKLIARKKDWDPKKYGGFDSPTVAYSVLVVAKVEKGKSKKLKSVKELLGITIMERSSFEKNPIDFLEAKGYKEVKKDLIIKLPKYSLFELENGRKRMLASAGELQKGNELALPSKYVNFLYLASHYEKLKGSPEDNEQKQLFVEQHKHYLDEIIEQISEFSKRVILADANLDKVLSAYNKHRDKPIREQAENIIHLFTLTNLGAPAAFKYFDTTIDRKRYTSTKEVLDATLIHQSITGLYETRIDLSQLGGDSGGSKRTADGSEFEGSSGGSSGGGSSGSSGGGSGGSGSGGGSGGSAPPGMRLRSGRSTGAPLTRGSPKKKRKVGSG

SEQ ID NO: 244 - protein, 1660 aa, synthetic construct
MKRTADGSEFESPKKKRKVSEVEFSHEYWMRHALTLAKRARDEREVPVGAVLVLNNRVIGEGWNRAIGLHDPTAHAEIMALRQGGLVMQNYRLIDATLYVTFEPCVMCAGAMIHSRIGRVVFGVRNSKRGAAGSLMNVLNYPGMNHRVEITEGILADECAALLCDFYRMPRQVFNAQKKAQSSINSGGSSGGSSGSETPGTSESATPESSGGSSGGSDKKYSIGLAIGTNSVGWAVITDEYKVPSKKFKVLGNTDRHSIKKNLIGALLFDSGETAEATRLKRTARRRYTRRKNRICYLQEIFSNEMAKVDDSFFHRLEESFLVEEDKKHERHPIFGNIVDEVAYHEKYPTIYHLRKKLVDSTDKADLRLIYLALAHMIKFRGHFLIEGDLNPDNSDVDKLFIQLVQTYNQLFEENPINASGVDAKAILSARLSKSRRLENLIAQLPGEKKNGLFGNLIALSLGLTPNFKSNFDLAEDAKLQLSKDTYDDDLDNLLAQIGDQYADLFLAAKNLSDAILLSDILRVNTEITKAPLSASMIKRYDEHHQDLTLLKALVRQQLPEKYKEIFFDQSKNGYAGYIDGGASQEEFYKFIKPILEKMDGTEELLVKLNREDLLRKQRTFDNGSIPHQIHLGELHAILRRQEDFYPFLKDNREKIEKILTFRIPYYVGPLARGNSRFAWMTRKSEETITPWNFEEVVDKGASAQSFIERMTNFDKNLPNEKVLPKHSLLYEYFTVYNELTKVKYVTEGMRKPAFLSGEQKKAIVDLLFKTNRKVTVKQLKEDYFKKIECFDSVEISGVEDRFNASLGTYHDLLKIIKDKDFLDNEENEDILEDIVLTLTLFEDREMIEERLKTYAHLFDDKVMKQLKRRRYTGWGRLSRKLINGIRDKQSGKTILDFLKSDGFANRNFMQLIHDDSLTFKEDIQKAQVSGQGDSLHEHIANLAGSPAIKKGILQTVKVVDELVKVMGRHKPENIVIEMARENQTTQKGQKNSRERMKRIEEGIKELGSQILKEHPVENTQLQNEKLYLYYLQNGRDMYVDQELDINRLSDYDVDHIVPQSFLKDDSIDNKVLTRSDKNRGKSDNVPSEEVVKKMKNYWRQLLNAKLITQRKFDNLTKAERGGLSELDKAGFIKRQLVETRQITKHVAQILDSRMNTKYDENDKLIREVKVITLKSKLVSDFRKDFQFYKVREINNYHHAHDAYLNAVVGTALIKKYPKLESEFVYGDYKVYDVRKMIAKSEQEIGKATAKYFFYSNIMNFFKTEITLANGEIRKRPLIETNGETGEIVWDKGRDFATVRKVLSMPQVNIVKKTEVQTGGFSKESILPKRNSDKLIARKKDWDPKKYGGFDSPTVAYSVLVVAKVEKGKSKKLKSVKELLGITIMERSSFEKNPIDFLEAKGYKEVKKDLIIKLPKYSLFELENGRKRMLASAGELQKGNELALPSKYVNFLYLASHYEKLKGSPEDNEQKQLFVEQHKHYLDEIIEQISEFSKRVILADANLDKVLSAYNKHRDKPIREQAENIIHLFTLTNLGAPAAFKYFDTTIDRKRYTSTKEVLDATLIHQSITGLYETRIDLSQLGGDSGGSKRTADGSEFEGSSGGSSGGGSSGSSGGGSGGSGSGGGSGGSAPPGMRLRSGRSTGAPLTRGSPKKKRKVGSG

SEQ ID NO: 245 - protein, 1873 aa, synthetic construct
MKRTADGSEFESPKKKRKVSEVEFSHEYWMRHALTLAKRAWDEREVPVGAVLVHNNRVIGEGWNRPIGRHDPTAHAEIMALRQGGLVMQNYRLIDATLYVTLEPCVMCAGAMIHSRIGRVVFGARDAKTGAAGSLMDVLHHPGMNHRVEITEGILADECAALLSDFFRMRRQEIKAQKKAQSSTDSGGSSGGSSGSETPGTSESATPESSGGSSGGSSEVEFSHEYWMRHALTLAKRARDEREVPVGAVLVLNNRVIGEGWNRAIGLHDPTAHAEIMALRQGGLVMQNYRLIDATLYVTFEPCVMCAGAMIHSRIGRVVFGVRNAKTGAAGSLMDVLHYPGMNHRVEITEGILADECAALLCYFFRMPRQVFNAQKKAQSSTDSGGSSGGSSGSETPGTSESATPESSGGSSGGSDKKYSIGLAIGTNSVGWAVITDEYKVPSKKFKVLGNTDRHSIKKNLIGALLFDSGETAEATRLKRTARRRYTRRKNRICYLQEIFSNEMAKVDDSFFHRLEESFLVEEDKKHERHPIFGNIVDEVAYHEKYPTIYHLRKKLVDSTDKADLRLIYLALAHMIKFRGHFLIEGDLNPDNSDVDKLFIQLVQTYNQLFEENPINASGVDAKAILSARLSKSRRLENLIAQLPGEKKNGLFGNLIALSLGLTPNFKSNFDLAEDAKLQLSKDTYDDDLDNLLAQIGDQYADLFLAAKNLSDAILLSDILRVNTEITKAPLSASMIKRYDEHHQDLTLLKALVRQQLPEKYKEIFFDQSKNGYAGYIDGGASQEEFYKFIKPILEKMDGTEELLVKLNREDLLRKQRTFDNGSIPHQIHLGELHAILRRQEDFYPFLKDNREKIEKILTFRIPYYVGPLARGNSRFAWMTRKSEETITPWNFEEVVDKGASAQSFIERMTNFDKNLPNEKVLPKHSLLYEYFTVYNELTKVKYVTEGMRKPAFLSGEQKKAIVDLLFKTNRKVTVKQLKEDYFKKIECFDSVEISGVEDRFNASLGTYHDLLKIIKDKDFLDNEENEDILEDIVLTLTLFEDREMIEERLKTYAHLFDDKVMKQLKRRRYTGWGRLSRKLINGIRDKQSGKTILDFLKSDGFANRNFMQLIHDDSLTFKEDIQKAQVSGQGDSLHEHIANLAGSPAIKKGILQTVKVVDELVKVMGRHKPENIVIEMARENQTTQKGQKNSRERMKRIEEGIKELGSQILKEHPVENTQLQNEKLYLYYLQNGRDMYVDQELDINRLSDYDVDHIVPQSFLKDDSIDNKVLTRSDKNRGKSDNVPSEEVVKKMKNYWRQLLNAKLITQRKFDNLTKAERGGLSELDKAGFIKRQLVETRQITKHVAQILDSRMNTKYDENDKLIREVKVITLKSKLVSDFRKDFQFYKVREINNYHHAHDAYLNAVVGTALIKKYPKLESEFVYGDYKVYDVRKMIAKSEQEIGKATAKYFFYSNIMNFFKTEITLANGEIRKRPLIETNGETGEIVWDKGRDFATVRKVLSMPQVNIVKKTEVQTGGFSKESILPKRNSDKLIARKKDWDPKKYGGFDSPTVAYSVLVVAKVEKGKSKKLKSVKELLGITIMERSSFEKNPIDFLEAKGYKEVKKDLIIKLPKYSLFELENGRKRMLASAGELQKGNELALPSKYVNFLYLASHYEKLKGSPEDNEQKQLFVEQHKHYLDEIIEQISEFSKRVILADANLDKVLSAYNKHRDKPIREQAENIIHLFTLTNLGAPAAFKYFDTTIDRKRYTSTKEVLDATLIHQSITGLYETRIDLSQLGGDSGGSKRTADGSEFEGSSGGSSGGGSSGSSGGGSGGSGSGGGSGGSEPEEERIRYSQRLRGTMRRRYEDDGISDDEIEGKGSPKKKRKVGSG

SEQ ID NO: 246 - protein, 1675 aa, synthetic construct
MKRTADGSEFESPKKKRKVSEVEFSHEYWMRHALTLAKRARDEREVPVGAVLVLNNRVIGEGWNRAIGLHDPTAHAEIMALRQGGLVMQNYRLIDATLYVTFEPCVMCAGAMIHSRIGRVVFGVRNSKRGAAGSLMNVLNYPGMNHRVEITEGILADECAALLCDFYRMPRQVFNAQKKAQSSINSGGSSGGSSGSETPGTSESATPESSGGSSGGSDKKYSIGLAIGTNSVGWAVITDEYKVPSKKFKVLGNTDRHSIKKNLIGALLFDSGETAEATRLKRTARRRYTRRKNRICYLQEIFSNEMAKVDDSFFHRLEESFLVEEDKKHERHPIFGNIVDEVAYHEKYPTIYHLRKKLVDSTDKADLRLIYLALAHMIKFRGHFLIEGDLNPDNSDVDKLFIQLVQTYNQLFEENPINASGVDAKAILSARLSKSRRLENLIAQLPGEKKNGLFGNLIALSLGLTPNFKSNFDLAEDAKLQLSKDTYDDDLDNLLAQIGDQYADLFLAAKNLSDAILLSDILRVNTEITKAPLSASMIKRYDEHHQDLTLLKALVRQQLPEKYKEIFFDQSKNGYAGYIDGGASQEEFYKFIKPILEKMDGTEELLVKLNREDLLRKQRTFDNGSIPHQIHLGELHAILRRQEDFYPFLKDNREKIEKILTFRIPYYVGPLARGNSRFAWMTRKSEETITPWNFEEVVDKGASAQSFIERMTNFDKNLPNEKVLPKHSLLYEYFTVYNELTKVKYVTEGMRKPAFLSGEQKKAIVDLLFKTNRKVTVKQLKEDYFKKIECFDSVEISGVEDRFNASLGTYHDLLKIIKDKDFLDNEENEDILEDIVLTLTLFEDREMIEERLKTYAHLFDDKVMKQLKRRRYTGWGRLSRKLINGIRDKQSGKTILDFLKSDGFANRNFMQLIHDDSLTFKEDIQKAQVSGQGDSLHEHIANLAGSPAIKKGILQTVKVVDELVKVMGRHKPENIVIEMARENQTTQKGQKNSRERMKRIEEGIKELGSQILKEHPVENTQLQNEKLYLYYLQNGRDMYVDQELDINRLSDYDVDHIVPQSFLKDDSIDNKVLTRSDKNRGKSDNVPSEEVVKKMKNYWRQLLNAKLITQRKFDNLTKAERGGLSELDKAGFIKRQLVETRQITKHVAQILDSRMNTKYDENDKLIREVKVITLKSKLVSDFRKDFQFYKVREINNYHHAHDAYLNAVVGTALIKKYPKLESEFVYGDYKVYDVRKMIAKSEQEIGKATAKYFFYSNIMNFFKTEITLANGEIRKRPLIETNGETGEIVWDKGRDFATVRKVLSMPQVNIVKKTEVQTGGFSKESILPKRNSDKLIARKKDWDPKKYGGFDSPTVAYSVLVVAKVEKGKSKKLKSVKELLGITIMERSSFEKNPIDFLEAKGYKEVKKDLIIKLPKYSLFELENGRKRMLASAGELQKGNELALPSKYVNFLYLASHYEKLKGSPEDNEQKQLFVEQHKHYLDEIIEQISEFSKRVILADANLDKVLSAYNKHRDKPIREQAENIIHLFTLTNLGAPAAFKYFDTTIDRKRYTSTKEVLDATLIHQSITGLYETRIDLSQLGGDSGGSKRTADGSEFEGSSGGSSGGGSSGSSGGGSGGSGSGGGSGGSEPEEERIRYSQRLRGTMRRRYEDDGISDDEIEGKGSPKKKRKVGSG

SEQ ID NO: 247 - protein, 1462 aa, synthetic construct
MKRTADGSEFESPKKKRKVDKKYSIGLDIGTNSVGWAVITDEYKVPSKKFKVLGNTDRHSIKKNLIGALLFDSGETAEATRLKRTARRRYTRRKNRICYLQEIFSNEMAKVDDSFFHRLEESFLVEEDKKHERHPIFGNIVDEVAYHEKYPTIYHLRKKLVDSTDKADLRLIYLALAHMIKFRGHFLIEGDLNPDNSDVDKLFIQLVQTYNQLFEENPINASGVDAKAILSARLSKSRRLENLIAQLPGEKKNGLFGNLIALSLGLTPNFKSNFDLAEDAKLQLSKDTYDDDLDNLLAQIGDQYADLFLAAKNLSDAILLSDILRVNTEITKAPLSASMIKRYDEHHQDLTLLKALVRQQLPEKYKEIFFDQSKNGYAGYIDGGASQEEFYKFIKPILEKMDGTEELLVKLNREDLLRKQRTFDNGSIPHQIHLGELHAILRRQEDFYPFLKDNREKIEKILTFRIPYYVGPLARGNSRFAWMTRKSEETITPWNFEEVVDKGASAQSFIERMTNFDKNLPNEKVLPKHSLLYEYFTVYNELTKVKYVTEGMRKPAFLSGEQKKAIVDLLFKTNRKVTVKQLKEDYFKKIECFDSVEISGVEDRFNASLGTYHDLLKIIKDKDFLDNEENEDILEDIVLTLTLFEDREMIEERLKTYAHLFDDKVMKQLKRRRYTGWGRLSRKLINGIRDKQSGKTILDFLKSDGFANRNFMQLIHDDSLTFKEDIQKAQVSGQGDSLHEHIANLAGSPAIKKGILQTVKVVDELVKVMGRHKPENIVIEMARENQTTQKGQKNSRERMKRIEEGIKELGSQILKEHPVENTQLQNEKLYLYYLQNGRDMYVDQELDINRLSDYDVDHIVPQSFLKDDSIDNKVLTRSDKNRGKSDNVPSEEVVKKMKNYWRQLLNAKLITQRKFDNLTKAERGGLSELDKAGFIKRQLVETRQITKHVAQILDSRMNTKYDENDKLIREVKVITLKSKLVSDFRKDFQFYKVREINNYHHAHDAYLNAVVGTALIKKYPKLESEFVYGDYKVYDVRKMIAKSEQEIGKATAKYFFYSNIMNFFKTEITLANGEIRKRPLIETNGETGEIVWDKGRDFATVRKVLSMPQVNIVKKTEVQTGGFSKESILPKRNSDKLIARKKDWDPKKYGGFDSPTVAYSVLVVAKVEKGKSKKLKSVKELLGITIMERSSFEKNPIDFLEAKGYKEVKKDLIIKLPKYSLFELENGRKRMLASAGELQKGNELALPSKYVNFLYLASHYEKLKGSPEDNEQKQLFVEQHKHYLDEIIEQISEFSKRVILADANLDKVLSAYNKHRDKPIREQAENIIHLFTLTNLGAPAAFKYFDTTIDRKRYTSTKEVLDATLIHQSITGLYETRIDLSQLGGDSGGSKRTADGSEFEGSSGGSSGGGSSGSSGGGSGGSGSGGGSGGSAPPGMRLRSGRSTGAPLTRGSPKKKRKVGSG

SEQ ID NO: 248 - protein, 1477 aa, synthetic construct
MKRTADGSEFESPKKKRKVDKKYSIGLDIGTNSVGWAVITDEYKVPSKKFKVLGNTDRHSIKKNLIGALLFDSGETAEATRLKRTARRRYTRRKNRICYLQEIFSNEMAKVDDSFFHRLEESFLVEEDKKHERHPIFGNIVDEVAYHEKYPTIYHLRKKLVDSTDKADLRLIYLALAHMIKFRGHFLIEGDLNPDNSDVDKLFIQLVQTYNQLFEENPINASGVDAKAILSARLSKSRRLENLIAQLPGEKKNGLFGNLIALSLGLTPNFKSNFDLAEDAKLQLSKDTYDDDLDNLLAQIGDQYADLFLAAKNLSDAILLSDILRVNTEITKAPLSASMIKRYDEHHQDLTLLKALVRQQLPEKYKEIFFDQSKNGYAGYIDGGASQEEFYKFIKPILEKMDGTEELLVKLNREDLLRKQRTFDNGSIPHQIHLGELHAILRRQEDFYPFLKDNREKIEKILTFRIPYYVGPLARGNSRFAWMTRKSEETITPWNFEEVVDKGASAQSFIERMTNFDKNLPNEKVLPKHSLLYEYFTVYNELTKVKYVTEGMRKPAFLSGEQKKAIVDLLFKTNRKVTVKQLKEDYFKKIECFDSVEISGVEDRFNASLGTYHDLLKIIKDKDFLDNEENEDILEDIVLTLTLFEDREMIEERLKTYAHLFDDKVMKQLKRRRYTGWGRLSRKLINGIRDKQSGKTILDFLKSDGFANRNFMQLIHDDSLTFKEDIQKAQVSGQGDSLHEHIANLAGSPAIKKGILQTVKVVDELVKVMGRHKPENIVIEMARENQTTQKGQKNSRERMKRIEEGIKELGSQILKEHPVENTQLQNEKLYLYYLQNGRDMYVDQELDINRLSDYDVDHIVPQSFLKDDSIDNKVLTRSDKNRGKSDNVPSEEVVKKMKNYWRQLLNAKLITQRKFDNLTKAERGGLSELDKAGFIKRQLVETRQITKHVAQILDSRMNTKYDENDKLIREVKVITLKSKLVSDFRKDFQFYKVREINNYHHAHDAYLNAVVGTALIKKYPKLESEFVYGDYKVYDVRKMIAKSEQEIGKATAKYFFYSNIMNFFKTEITLANGEIRKRPLIETNGETGEIVWDKGRDFATVRKVLSMPQVNIVKKTEVQTGGFSKESILPKRNSDKLIARKKDWDPKKYGGFDSPTVAYSVLVVAKVEKGKSKKLKSVKELLGITIMERSSFEKNPIDFLEAKGYKEVKKDLIIKLPKYSLFELENGRKRMLASAGELQKGNELALPSKYVNFLYLASHYEKLKGSPEDNEQKQLFVEQHKHYLDEIIEQISEFSKRVILADANLDKVLSAYNKHRDKPIREQAENIIHLFTLTNLGAPAAFKYFDTTIDRKRYTSTKEVLDATLIHQSITGLYETRIDLSQLGGDSGGSKRTADGSEFEGSSGGSSGGGSSGSSGGGSGGSGSGGGSGGSEPEEERIRYSQRLRGTMRRRYEDDGISDDEIEGKGSPKKKRKVGSG

SEQ ID NO: 249 - protein, 1533 aa, synthetic construct
MKRTADGSEFESPKKKRKVSSEPEEERIRYSQRLRGTMRRRYEDDGISDDEIEGKGSSGGSSGGGSSGSSGGGSGGSGSGGGSGGSSKLEKFTNCYSLSKTLRFKAIPVGKTQENIDNKRLLVEDEKRAEDYKGVKKLLDRYYLSFINDVLHSIKLKNLNNYISLFRKKTRTEKENKELENLEINLRKEIAKAFKGNEGYKSLFKKDIIETILPEFLDDKDEIALVNSFNGFTTAFTGFFDNRENMFSEEAKSTSIAFRCINENLTRYISNMDIFEKVDAIFDKHEVQEIKEKILNSDYDVEDFFEGEFFNFVLTQEGIDVYNAIIGGFVTESGEKIKGLNEYINLYNQKTKQKLPKFKPLYKQVLSDRESLSFYGEGYTSDEEVLEVFRNTLNKNSEIFSSIKKLEKLFKNFDEYSSAGIFVKNGPAISTISKDIFGEWNVIRDKWNAEYDDIHLKKKAVVTEKYEDDRRKSFKKIGSFSLEQLQEYADADLSVVEKLKEIIIQKVDEIYKVYGSSEKLFDADFVLEKSLKKNDAVVAIMKDLLDSVKSFENYIKAFFGEGKETNRDESFYGDFVLAYDILLKVDHIYDAIRNYVTQKPYSKDKFKLYFQNPQFMGGWDKDKETDYRATILRYGSKYYLAIMDKKYAKCLQKIDKDDVNGNYEKINYKLLPGPNKMLPKVFFSKKWMAYYNPSEDIQKIYKNGTFKKGDMFNLNDCHKLIDFFKDSISRYPKWSNAYDFNFSETEKYKDIAGFYREVEEQGYKVSFESASKKEVDKLVEEGKLYMFQIYNKDFSDKSHGTPNLHTMYFKLLFDENNHGQIRLSGGAELFMRRASLKKEELVVHPANSPIANKNPDNPKKTTTLSYDVYKDKRFSEDQYELHIPIAINKCPKNIFKINTEVRVLLKHDDNPYVIGIARGERNLLYIVVVDGKGNIVEQYSLNEIINNFNGIRIKTDYHSLLDKKEKERFEARQNWTSIENIKELKAGYISQVVHKICELVEKYDAVIALEDLNSGFKNSRVKVEKQVYQKFEKMLIDKLNYMVDKKSNPCATGGALKGYQITNKFESFKSMSTQNGFIFYIPAWLTSKIDPSTGFVNLLKTKYTSIADSKKFISSFDRIMYVPEEDLFEFALDYKNFSRTDADYIKKWKLYSYGNRIRIFRNPKKNNVFDWEEVCLTSAYKELFNKYGINYQQGDIRALLCEQSDKAFYSSFMALMSLMLQMRNSITGRTDVDFLISPVKNSDGIFYDSRNYEAQENAILPKNADANGAYNIARKVLWAIGQFKKAEDEKLDKVKIAISNKEWLEYAQTSVKHERDKSKSSSKDQQQQDEQQYPPPPPQKDSSSEVEFSHEYWMRHALTLAKRARDEREVPVGAVLVLNNRVIGEGWNRAIGLHDPTAHAEIMALRQGGLVMQNYRLIDATLYVTFEPCVMCAGAMIHSRIGRVVFGVRNSKRGAAGSLMNVLNYPGMNHRVEITEGILADECAALLCDFYRMPRQVFNAQKKAQSSINSGGSKRTADGSEFEPKKKRKVGSG

SEQ ID NO: 250 - protein, 1520 aa, synthetic construct
MKRTADGSEFESPKKKRKVSSAPPGMRLRSGRSTGAPLTRGSGSSGGSSGGGSSGSSGGGSGGSGSGGGSGGSSKLEKFTNCYSLSKTLRFKAIPVGKTQENIDNKRLLVEDEKRAEDYKGVKKLLDRYYLSFINDVLHSIKLKNLNNYISLFRKKTRTEKENKELENLEINLRKEIAKAFKGNEGYKSLFKKDIIETILPEFLDDKDEIALVNSFNGFTTAFTGFFDNRENMFSEEAKSTSIAFRCINENLTRYISNMDIFEKVDAIFDKHEVQEIKEKILNSDYDVEDFFEGEFFNFVLTQEGIDVYNAIIGGFVTESGEKIKGLNEYINLYNQKTKQKLPKFKPLYKQVLSDRESLSFYGEGYTSDEEVLEVFRNTLNKNSEIFSSIKKLEKLFKNFDEYSSAGIFVKNGPAISTISKDIFGEWNVIRDKWNAEYDDIHLKKKAVVTEKYEDDRRKSFKKIGSFSLEQLQEYADADLSVVEKLKEIIIQKVDEIYKVYGSSEKLFDADFVLEKSLKKNDAVVAIMKDLLDSVKSFENYIKAFFGEGKETNRDESFYGDFVLAYDILLKVDHIYDAIRNYVTQKPYSKDKFKLYFQNPQFMGGWDKDKETDYRATILRYGSKYYLAIMDKKYAKCLQKIDKDDVNGNYEKINYKLLPGPNKMLPKVFFSKKWMAYYNPSEDIQKIYKNGTFKKGDMFNLNDCHKLIDFFKDSISRYPKWSNAYDFNFSETEKYKDIAGFYREVEEQGYKVSFESASKKEVDKLVEEGKLYMFQIYNKDFSDKSHGTPNLHTMYFKLLFDENNHGQIRLSGGAELFMRRASLKKEELVVHPANSPIANKNPDNPKKTTTLSYDVYKDKRFSEDQYELHIPIAINKCPKNIFKINTEVRVLLKHDDNPYVIGIARGERNLLYIVVVDGKGNIVEQYSLNEIINNFNGIRIKTDYHSLLDKKEKERFEARQNWTSIENIKELKAGYISQVVHKICELVEKYDAVIALEDLNSGFKNSRVKVEKQVYQKFEKMLIDKLNYMVDKKSNPCATGGALKGYQITNKFESFKSMSTQNGFIFYIPAWLTSKIDPSTGFVNLLKTKYTSIADSKKFISSFDRIMYVPEEDLFEFALDYKNFSRTDADYIKKWKLYSYGNRIRIFRNPKKNNVFDWEEVCLTSAYKELFNKYGINYQQGDIRALLCEQSDKAFYSSFMALMSLMLQMRNSITGRTDVDFLISPVKNSDGIFYDSRNYEAQENAILPKNADANGAYNIARKVLWAIGQFKKAEDEKLDKVKIAISNKEWLEYAQTSVKHERDKSKSSSKDQQQQDEQQYPPPPPQKDSSSEVEFSHEYWMRHALTLAKRARDEREVPVGAVLVLNNRVIGEGWNRAIGLHDPTAHAEIMALRQGGLVMQNYRLIDATLYVTFEPCVMCAGAMIHSRIGRVVFGVRNSKRGAAGSLMNVLNYPGMNHRVEITEGILADECAALLCDFYRMPRQVFNAQKKAQSSINSGGSKRTADGSEFEPKKKRKVGSG

SEQ ID NO: 251 - protein, 1694 aa, synthetic construct
MKRTADGSEFESPKKKRKVEASPASGPRHLMDPHIFTSNFNNGIGRHKTYLCYEVERLDNGTSVKMDQHRGFLHNQAKNLLCGFYGRHAELRFLDLVPSLQLDPAQIYRVTWFISWSPCFSWGCAGEVRAFLQENTHVRLRIFAARIYDYDPLYKEALQMLRDAGAQVSIMTYDEFKHCWDTFVDHQGCPFQPWDGLDEHSQALSGRLRAILQNQGNSTSQSDGSSVPADIDQSSDSDQSSSQGQPGSKLEKFTNCYSLSKTLRFKAIPVGKTQENIDNKRLLVEDEKRAEDYKGVKKLLDRYYLSFINDVLHSIKLKNLNNYISLFRKKTRTEKENKELENLEINLRKEIAKAFKGNEGYKSLFKKDIIETILPEFLDDKDEIALVNSFNGFTTAFTGFFDNRENMFSEEAKSTSIAFRCINENLTRYISNMDIFEKVDAIFDKHEVQEIKEKILNSDYDVEDFFEGEFFNFVLTQEGIDVYNAIIGGFVTESGEKIKGLNEYINLYNQKTKQKLPKFKPLYKQVLSDRESLSFYGENQTTQKGQKNSRERMKRIEEGIKELGSQILKEHPVENTQLQNEKLYLYYLQNGRDMYVDQELDINRLSDYDVDHIVPQSFLKDDSIDNKVLTRSDKNRGKSDNVPSEEVVKKMKNYWRQLLNAKLITQRKFDNLTKAERGGLSEGYTSDEEVLEVFRNTLNKNSEIFSSIKKLEKLFKNFDEYSSAGIFVKNGPAISTISKDIFGEWNVIRDKWNAEYDDIHLKKKAVVTEKYEDDRRKSFKKIGSFSLEQLQEYADADLSVVEKLKEIIIQKVDEIYKVYGSSEKLFDADFVLEKSLKKNDAVVAIMKDLLDSVKSFENYIKAFFGEGKETNRDESFYGDFVLAYDILLKVDHIYDAIRNYVTQKPYSKDKFKLYFQNPQFMGGWDKDKETDYRATILRYGSKYYLAIMDKKYAKCLQKIDKDDVNGNYEKINYKLLPGPNKMLPKVFFSKKWMAYYNPSEDIQKIYKNGTFKKGDMFNLNDCHKLIDFFKDSISRYPKWSNAYDFNFSETEKYKDIAGFYREVEEQGYKVSFESASKKEVDKLVEEGKLYMFQIYNKDFSDKSHGTPNLHTMYFKLLFDENNHGQIRLSGGAELFMRRASLKKEELVVHPANSPIANKNPDNPKKTTTLSYDVYKDKRFSEDQYELHIPIAINKCPKNIFKINTEVRVLLKHDDNPYVIGIARGERNLLYIVVVDGKGNIVEQYSLNEIINNFNGIRIKTDYHSLLDKKEKERFEARQNWTSIENIKELKAGYISQVVHKICELVEKYDAVIALEDLNSGFKNSRVKVEKQVYQKFEKMLIDKLNYMVDKKSNPCATGGALKGYQITNKFESFKSMSTQNGFIFYIPAWLTSKIDPSTGFVNLLKTKYTSIADSKKFISSFDRIMYVPEEDLFEFALDYKNFSRTDADYIKKWKLYSYGNRIRIFRNPKKNNVFDWEEVCLTSAYKELFNKYGINYQQGDIRALLCEQSDKAFYSSFMALMSLMLQMRNSITGRTDVDFLISPVKNSDGIFYDSRNYEAQENAILPKNADANGAYNIARKVLWAIGQFKKAEDEKLDKVKIAISNKEWLEYAQTSVKHSGGSKRTADGSEFEGSSGGSSGGGSSGSSGGGSGGSGSGGGSGGSAPPGMRLRSGRSTGAPLTRGSPKKKRKVGSG

SEQ ID NO: 252 - protein, 1709 aa, synthetic construct
MKRTADGSEFESPKKKRKVEASPASGPRHLMDPHIFTSNFNNGIGRHKTYLCYEVERLDNGTSVKMDQHRGFLHNQAKNLLCGFYGRHAELRFLDLVPSLQLDPAQIYRVTWFISWSPCFSWGCAGEVRAFLQENTHVRLRIFAARIYDYDPLYKEALQMLRDAGAQVSIMTYDEFKHCWDTFVDHQGCPFQPWDGLDEHSQALSGRLRAILQNQGNSTSQSDGSSVPADIDQSSDSDQSSSQGQPGSKLEKFTNCYSLSKTLRFKAIPVGKTQENIDNKRLLVEDEKRAEDYKGVKKLLDRYYLSFINDVLHSIKLKNLNNYISLFRKKTRTEKENKELENLEINLRKEIAKAFKGNEGYKSLFKKDIIETILPEFLDDKDEIALVNSFNGFTTAFTGFFDNRENMFSEEAKSTSIAFRCINENLTRYISNMDIFEKVDAIFDKHEVQEIKEKILNSDYDVEDFFEGEFFNFVLTQEGIDVYNAIIGGFVTESGEKIKGLNEYINLYNQKTKQKLPKFKPLYKQVLSDRESLSFYGENQTTQKGQKNSRERMKRIEEGIKELGSQILKEHPVENTQLQNEKLYLYYLQNGRDMYVDQELDINRLSDYDVDHIVPQSFLKDDSIDNKVLTRSDKNRGKSDNVPSEEVVKKMKNYWRQLLNAKLITQRKFDNLTKAERGGLSEGYTSDEEVLEVFRNTLNKNSEIFSSIKKLEKLFKNFDEYSSAGIFVKNGPAISTISKDIFGEWNVIRDKWNAEYDDIHLKKKAVVTEKYEDDRRKSFKKIGSFSLEQLQEYADADLSVVEKLKEIIIQKVDEIYKVYGSSEKLFDADFVLEKSLKKNDAVVAIMKDLLDSVKSFENYIKAFFGEGKETNRDESFYGDFVLAYDILLKVDHIYDAIRNYVTQKPYSKDKFKLYFQNPQFMGGWDKDKETDYRATILRYGSKYYLAIMDKKYAKCLQKIDKDDVNGNYEKINYKLLPGPNKMLPKVFFSKKWMAYYNPSEDIQKIYKNGTFKKGDMFNLNDCHKLIDFFKDSISRYPKWSNAYDFNFSETEKYKDIAGFYREVEEQGYKVSFESASKKEVDKLVEEGKLYMFQIYNKDFSDKSHGTPNLHTMYFKLLFDENNHGQIRLSGGAELFMRRASLKKEELVVHPANSPIANKNPDNPKKTTTLSYDVYKDKRFSEDQYELHIPIAINKCPKNIFKINTEVRVLLKHDDNPYVIGIARGERNLLYIVVVDGKGNIVEQYSLNEIINNFNGIRIKTDYHSLLDKKEKERFEARQNWTSIENIKELKAGYISQVVHKICELVEKYDAVIALEDLNSGFKNSRVKVEKQVYQKFEKMLIDKLNYMVDKKSNPCATGGALKGYQITNKFESFKSMSTQNGFIFYIPAWLTSKIDPSTGFVNLLKTKYTSIADSKKFISSFDRIMYVPEEDLFEFALDYKNFSRTDADYIKKWKLYSYGNRIRIFRNPKKNNVFDWEEVCLTSAYKELFNKYGINYQQGDIRALLCEQSDKAFYSSFMALMSLMLQMRNSITGRTDVDFLISPVKNSDGIFYDSRNYEAQENAILPKNADANGAYNIARKVLWAIGQFKKAEDEKLDKVKIAISNKEWLEYAQTSVKHSGGSKRTADGSEFEGSSGGSSGGGSSGSSGGGSGGSGSGGGSGGSEPEEERIRYSQRLRGTMRRRYEDDGISDDEIEGKGSPKKKRKVGSG

SEQ ID NO: 253 - protein, 1645 aa, synthetic construct
MKRTADGSEFESPKKKRKVSHQDWMRMALEQAKIAYDLGEVPIGAVVIQDNKVIALAHNEKEQRQDPTAHAEVLAVQRATEKLGTWRLSDATLYVTLEPCPMCAGALVQSRLRTLVFGVSNLKRGAVGSVMNVLDFSRWNHRVEVVAGILEEDCSAILKNFYRQPRSGGSSGGSSGSETPGTSESATPESSGGSSGGSSKLEKFTNCYSLSKTLRFKAIPVGKTQENIDNKRLLVEDEKRAEDYKGVKKLLDRYYLSFINDVLHSIKLKNLNNYISLFRKKTRTEKENKELENLEINLRKEIAKAFKGNEGYKSLFKKDIIETILPEFLDDKDEIALVNSFNGFTTAFTGFFDNRENMFSEEAKSTSIAFRCINENLTRYISNMDIFEKVDAIFDKHEVQEIKEKILNSDYDVEDFFEGEFFNFVLTQEGIDVYNAIIGGFVTESGEKIKGLNEYINLYNQKTKQKLPKFKPLYKQVLSDRESLSFYGENQTTQKGQKNSRERMKRIEEGIKELGSQILKEHPVENTQLQNEKLYLYYLQNGRDMYVDQELDINRLSDYDVDHIVPQSFLKDDSIDNKVLTRSDKNRGKSDNVPSEEVVKKMKNYWRQLLNAKLITQRKFDNLTKAERGGLSEGYTSDEEVLEVFRNTLNKNSEIFSSIKKLEKLFKNFDEYSSAGIFVKNGPAISTISKDIFGEWNVIRDKWNAEYDDIHLKKKAVVTEKYEDDRRKSFKKIGSFSLEQLQEYADADLSVVEKLKEIIIQKVDEIYKVYGSSEKLFDADFVLEKSLKKNDAVVAIMKDLLDSVKSFENYIKAFFGEGKETNRDESFYGDFVLAYDILLKVDHIYDAIRNYVTQKPYSKDKFKLYFQNPQFMGGWDKDKETDYRATILRYGSKYYLAIMDKKYAKCLQKIDKDDVNGNYEKINYKLLPGPNKMLPKVFFSKKWMAYYNPSEDIQKIYKNGTFKKGDMFNLNDCHKLIDFFKDSISRYPKWSNAYDFNFSETEKYKDIAGFYREVEEQGYKVSFESASKKEVDKLVEEGKLYMFQIYNKDFSDKSHGTPNLHTMYFKLLFDENNHGQIRLSGGAELFMRRASLKKEELVVHPANSPIANKNPDNPKKTTTLSYDVYKDKRFSEDQYELHIPIAINKCPKNIFKINTEVRVLLKHDDNPYVIGIARGERNLLYIVVVDGKGNIVEQYSLNEIINNFNGIRIKTDYHSLLDKKEKERFEARQNWTSIENIKELKAGYISQVVHKICELVEKYDAVIALEDLNSGFKNSRVKVEKQVYQKFEKMLIDKLNYMVDKKSNPCATGGALKGYQITNKFESFKSMSTQNGFIFYIPAWLTSKIDPSTGFVNLLKTKYTSIADSKKFISSFDRIMYVPEEDLFEFALDYKNFSRTDADYIKKWKLYSYGNRIRIFRNPKKNNVFDWEEVCLTSAYKELFNKYGINYQQGDIRALLCEQSDKAFYSSFMALMSLMLQMRNSITGRTDVDFLISPVKNSDGIFYDSRNYEAQENAILPKNADANGAYNIARKVLWAIGQFKKAEDEKLDKVKIAISNKEWLEYAQTSVKHSGGSKRTADGSEFEGSSGGSSGGGSSGSSGGGSGGSGSGGGSGGSAPPGMRLRSGRSTGAPLTRGSPKKKRKVGSG

SEQ ID NO: 254 - protein, 1660 aa, synthetic construct
MKRTADGSEFESPKKKRKVSHQDWMRMALEQAKIAYDLGEVPIGAVVIQDNKVIALAHNEKEQRQDPTAHAEVLAVQRATEKLGTWRLSDATLYVTLEPCPMCAGALVQSRLRTLVFGVSNLKRGAVGSVMNVLDFSRWNHRVEVVAGILEEDCSAILKNFYRQPRSGGSSGGSSGSETPGTSESATPESSGGSSGGSSKLEKFTNCYSLSKTLRFKAIPVGKTQENIDNKRLLVEDEKRAEDYKGVKKLLDRYYLSFINDVLHSIKLKNLNNYISLFRKKTRTEKENKELENLEINLRKEIAKAFKGNEGYKSLFKKDIIETILPEFLDDKDEIALVNSFNGFTTAFTGFFDNRENMFSEEAKSTSIAFRCINENLTRYISNMDIFEKVDAIFDKHEVQEIKEKILNSDYDVEDFFEGEFFNFVLTQEGIDVYNAIIGGFVTESGEKIKGLNEYINLYNQKTKQKLPKFKPLYKQVLSDRESLSFYGENQTTQKGQKNSRERMKRIEEGIKELGSQILKEHPVENTQLQNEKLYLYYLQNGRDMYVDQELDINRLSDYDVDHIVPQSFLKDDSIDNKVLTRSDKNRGKSDNVPSEEVVKKMKNYWRQLLNAKLITQRKFDNLTKAERGGLSEGYTSDEEVLEVFRNTLNKNSEIFSSIKKLEKLFKNFDEYSSAGIFVKNGPAISTISKDIFGEWNVIRDKWNAEYDDIHLKKKAVVTEKYEDDRRKSFKKIGSFSLEQLQEYADADLSVVEKLKEIIIQKVDEIYKVYGSSEKLFDADFVLEKSLKKNDAVVAIMKDLLDSVKSFENYIKAFFGEGKETNRDESFYGDFVLAYDILLKVDHIYDAIRNYVTQKPYSKDKFKLYFQNPQFMGGWDKDKETDYRATILRYGSKYYLAIMDKKYAKCLQKIDKDDVNGNYEKINYKLLPGPNKMLPKVFFSKKWMAYYNPSEDIQKIYKNGTFKKGDMFNLNDCHKLIDFFKDSISRYPKWSNAYDFNFSETEKYKDIAGFYREVEEQGYKVSFESASKKEVDKLVEEGKLYMFQIYNKDFSDKSHGTPNLHTMYFKLLFDENNHGQIRLSGGAELFMRRASLKKEELVVHPANSPIANKNPDNPKKTTTLSYDVYKDKRFSEDQYELHIPIAINKCPKNIFKINTEVRVLLKHDDNPYVIGIARGERNLLYIVVVDGKGNIVEQYSLNEIINNFNGIRIKTDYHSLLDKKEKERFEARQNWTSIENIKELKAGYISQVVHKICELVEKYDAVIALEDLNSGFKNSRVKVEKQVYQKFEKMLIDKLNYMVDKKSNPCATGGALKGYQITNKFESFKSMSTQNGFIFYIPAWLTSKIDPSTGFVNLLKTKYTSIADSKKFISSFDRIMYVPEEDLFEFALDYKNFSRTDADYIKKWKLYSYGNRIRIFRNPKKNNVFDWEEVCLTSAYKELFNKYGINYQQGDIRALLCEQSDKAFYSSFMALMSLMLQMRNSITGRTDVDFLISPVKNSDGIFYDSRNYEAQENAILPKNADANGAYNIARKVLWAIGQFKKAEDEKLDKVKIAISNKEWLEYAQTSVKHSGGSKRTADGSEFEGSSGGSSGGGSSGSSGGGSGGSGSGGGSGGSEPEEERIRYSQRLRGTMRRRYEDDGISDDEIEGKGSPKKKRKVGSG

SEQ ID NO: 255 - protein, 1664 aa, synthetic construct
MKRTADGSEFESPKKKRKVSEVEFSHEYWMRHALTLAKRARDEREVPVGAVLVLNNRVIGEGWNRAIGLHDPTAHAEIMALRQGGLVMQNYRLIDATLYVTFEPCVMCAGAMIHSRIGRVVFGVRNSKRGAAGSLMNVLNYPGMNHRVEITEGILADECAALLCDFYRMPRQVFNAQKKAQSSINSGGSSGGSSGSETPGTSESATPESSGGSSGGSSKLEKFTNCYSLSKTLRFKAIPVGKTQENIDNKRLLVEDEKRAEDYKGVKKLLDRYYLSFINDVLHSIKLKNLNNYISLFRKKTRTEKENKELENLEINLRKEIAKAFKGNEGYKSLFKKDIIETILPEFLDDKDEIALVNSFNGFTTAFTGFFDNRENMFSEEAKSTSIAFRCINENLTRYISNMDIFEKVDAIFDKHEVQEIKEKILNSDYDVEDFFEGEFFNFVLTQEGIDVYNAIIGGFVTESGEKIKGLNEYINLYNQKTKQKLPKFKPLYKQVLSDRESLSFYGENQTTQKGQKNSRERMKRIEEGIKELGSQILKEHPVENTQLQNEKLYLYYLQNGRDMYVDQELDINRLSDYDVDHIVPQSFLKDDSIDNKVLTRSDKNRGKSDNVPSEEVVKKMKNYWRQLLNAKLITQRKFDNLTKAERGGLSEGYTSDEEVLEVFRNTLNKNSEIFSSIKKLEKLFKNFDEYSSAGIFVKNGPAISTISKDIFGEWNVIRDKWNAEYDDIHLKKKAVVTEKYEDDRRKSFKKIGSFSLEQLQEYADADLSVVEKLKEIIIQKVDEIYKVYGSSEKLFDADFVLEKSLKKNDAVVAIMKDLLDSVKSFENYIKAFFGEGKETNRDESFYGDFVLAYDILLKVDHIYDAIRNYVTQKPYSKDKFKLYFQNPQFMGGWDKDKETDYRATILRYGSKYYLAIMDKKYAKCLQKIDKDDVNGNYEKINYKLLPGPNKMLPKVFFSKKWMAYYNPSEDIQKIYKNGTFKKGDMFNLNDCHKLIDFFKDSISRYPKWSNAYDFNFSETEKYKDIAGFYREVEEQGYKVSFESASKKEVDKLVEEGKLYMFQIYNKDFSDKSHGTPNLHTMYFKLLFDENNHGQIRLSGGAELFMRRASLKKEELVVHPANSPIANKNPDNPKKTTTLSYDVYKDKRFSEDQYELHIPIAINKCPKNIFKINTEVRVLLKHDDNPYVIGIARGERNLLYIVVVDGKGNIVEQYSLNEIINNFNGIRIKTDYHSLLDKKEKERFEARQNWTSIENIKELKAGYISQVVHKICELVEKYDAVIALEDLNSGFKNSRVKVEKQVYQKFEKMLIDKLNYMVDKKSNPCATGGALKGYQITNKFESFKSMSTQNGFIFYIPAWLTSKIDPSTGFVNLLKTKYTSIADSKKFISSFDRIMYVPEEDLFEFALDYKNFSRTDADYIKKWKLYSYGNRIRIFRNPKKNNVFDWEEVCLTSAYKELFNKYGINYQQGDIRALLCEQSDKAFYSSFMALMSLMLQMRNSITGRTDVDFLISPVKNSDGIFYDSRNYEAQENAILPKNADANGAYNIARKVLWAIGQFKKAEDEKLDKVKIAISNKEWLEYAQTSVKHSGGSKRTADGSEFEGSSGGSSGGGSSGSSGGGSGGSGSGGGSGGSAPPGMRLRSGRSTGAPLTRGSPKKKRKVGSG

SEQ ID NO: 256 - protein, 1679 aa, synthetic construct
MKRTADGSEFESPKKKRKVSEVEFSHEYWMRHALTLAKRARDEREVPVGAVLVLNNRVIGEGWNRAIGLHDPTAHAEIMALRQGGLVMQNYRLIDATLYVTFEPCVMCAGAMIHSRIGRVVFGVRNSKRGAAGSLMNVLNYPGMNHRVEITEGILADECAALLCDFYRMPRQVFNAQKKAQSSINSGGSSGGSSGSETPGTSESATPESSGGSSGGSSKLEKFTNCYSLSKTLRFKAIPVGKTQENIDNKRLLVEDEKRAEDYKGVKKLLDRYYLSFINDVLHSIKLKNLNNYISLFRKKTRTEKENKELENLEINLRKEIAKAFKGNEGYKSLFKKDIIETILPEFLDDKDEIALVNSFNGFTTAFTGFFDNRENMFSEEAKSTSIAFRCINENLTRYISNMDIFEKVDAIFDKHEVQEIKEKILNSDYDVEDFFEGEFFNFVLTQEGIDVYNAIIGGFVTESGEKIKGLNEYINLYNQKTKQKLPKFKPLYKQVLSDRESLSFYGENQTTQKGQKNSRERMKRIEEGIKELGSQILKEHPVENTQLQNEKLYLYYLQNGRDMYVDQELDINRLSDYDVDHIVPQSFLKDDSIDNKVLTRSDKNRGKSDNVPSEEVVKKMKNYWRQLLNAKLITQRKFDNLTKAERGGLSEGYTSDEEVLEVFRNTLNKNSEIFSSIKKLEKLFKNFDEYSSAGIFVKNGPAISTISKDIFGEWNVIRDKWNAEYDDIHLKKKAVVTEKYEDDRRKSFKKIGSFSLEQLQEYADADLSVVEKLKEIIIQKVDEIYKVYGSSEKLFDADFVLEKSLKKNDAVVAIMKDLLDSVKSFENYIKAFFGEGKETNRDESFYGDFVLAYDILLKVDHIYDAIRNYVTQKPYSKDKFKLYFQNPQFMGGWDKDKETDYRATILRYGSKYYLAIMDKKYAKCLQKIDKDDVNGNYEKINYKLLPGPNKMLPKVFFSKKWMAYYNPSEDIQKIYKNGTFKKGDMFNLNDCHKLIDFFKDSISRYPKWSNAYDFNFSETEKYKDIAGFYREVEEQGYKVSFESASKKEVDKLVEEGKLYMFQIYNKDFSDKSHGTPNLHTMYFKLLFDENNHGQIRLSGGAELFMRRASLKKEELVVHPANSPIANKNPDNPKKTTTLSYDVYKDKRFSEDQYELHIPIAINKCPKNIFKINTEVRVLLKHDDNPYVIGIARGERNLLYIVVVDGKGNIVEQYSLNEIINNFNGIRIKTDYHSLLDKKEKERFEARQNWTSIENIKELKAGYISQVVHKICELVEKYDAVIALEDLNSGFKNSRVKVEKQVYQKFEKMLIDKLNYMVDKKSNPCATGGALKGYQITNKFESFKSMSTQNGFIFYIPAWLTSKIDPSTGFVNLLKTKYTSIADSKKFISSFDRIMYVPEEDLFEFALDYKNFSRTDADYIKKWKLYSYGNRIRIFRNPKKNNVFDWEEVCLTSAYKELFNKYGINYQQGDIRALLCEQSDKAFYSSFMALMSLMLQMRNSITGRTDVDFLISPVKNSDGIFYDSRNYEAQENAILPKNADANGAYNIARKVLWAIGQFKKAEDEKLDKVKIAISNKEWLEYAQTSVKHSGGSKRTADGSEFEGSSGGSSGGGSSGSSGGGSGGSGSGGGSGGSEPEEERIRYSQRLRGTMRRRYEDDGISDDEIEGKGSPKKKRKVGSG

SEQ ID NO: 257 - DNA, 20 bp, synthetic construct
  source 1..20: mol_type = other DNA
ggggccactagggacaggat

SEQ ID NO: 258 - DNA, 20 bp, synthetic construct
  source 1..20: mol_type = other DNA
gagtccgagcagaagaagaa

SEQ ID NO: 259 - DNA, 20 bp, synthetic construct
  source 1..20: mol_type = other DNA
gaacacaaagcatagactgc

SEQ ID NO: 260 - DNA, 20 bp, synthetic construct
  source 1..20: mol_type = other DNA
gtcatcttagtcattacctg

SEQ ID NO: 261 - DNA, 20 bp, synthetic construct
  source 1..20: mol_type = other DNA
gcactacctacgtcagcacc

SEQ ID NO: 262 - DNA, 20 bp, synthetic construct
  source 1..20: mol_type = other DNA
ctgtcacagttagctcagcc

SEQ ID NO: 263 - DNA, 20 bp, synthetic construct
  source 1..20: mol_type = other DNA
agttcccatgttttgcttaa

SEQ ID NO: 264 - protein, 1806 aa, synthetic construct
MKRTADGSEFESPKKKRKVSEVEFSHEYWMRHALTLAKRAWDEREVPVGAVLVHNNRVIGEGWNRPIGRHDPTAHAEIMALRQGGLVMQNYRLIDATLYVTLEPCVMCAGAMIHSRIGRVVFGARDAKTGAAGSLMDVLHHPGMNHRVEITEGILADECAALLSDFFRMRRQEIKAQKKAQSSTDSGGSSGGSSGSETPGTSESATPESSGGSSGGSSEVEFSHEYWMRHALTLAKRARDEREVPVGAVLVLNNRVIGEGWNRAIGLHDPTAHAEIMALRQGGLVMQNYRLIDATLYVTFEPCVMCAGAMIHSRIGRVVFGVRNAKTGAAGSLMDVLHYPGMNHRVEITEGILADECAALLCYFFRMPRQVFNAQKKAQSSTDSGGSSGGSSGSETPGTSESATPESSGGSSGGSDKKYSIGLAIGTNSVGWAVITDEYKVPSKKFKVLGNTDRHSIKKNLIGALLFDSGETAEATRLKRTARRRYTRRKNRICYLQEIFSNEMAKVDDSFFHRLEESFLVEEDKKHERHPIFGNIVDEVAYHEKYPTIYHLRKKLVDSTDKADLRLIYLALAHMIKFRGHFLIEGDLNPDNSDVDKLFIQLVQTYNQLFEENPINASGVDAKAILSARLSKSRRLENLIAQLPGEKKNGLFGNLIALSLGLTPNFKSNFDLAEDAKLQLSKDTYDDDLDNLLAQIGDQYADLFLAAKNLSDAILLSDILRVNTEITKAPLSASMIKRYDEHHQDLTLLKALVRQQLPEKYKEIFFDQSKNGYAGYIDGGASQEEFYKFIKPILEKMDGTEELLVKLNREDLLRKQRTFDNGSIPHQIHLGELHAILRRQEDFYPFLKDNREKIEKILTFRIPYYVGPLARGNSRFAWMTRKSEETITPWNFEEVVDKGASAQSFIERMTNFDKNLPNEKVLPKHSLLYEYFTVYNELTKVKYVTEGMRKPAFLSGEQKKAIVDLLFKTNRKVTVKQLKEDYFKKIECFDSVEISGVEDRFNASLGTYHDLLKIIKDKDFLDNEENEDILEDIVLTLTLFEDREMIEERLKTYAHLFDDKVMKQLKRRRYTGWGRLSRKLINGIRDKQSGKTILDFLKSDGFANRNFMQLIHDDSLTFKEDIQKAQVSGQGDSLHEHIANLAGSPAIKKGILQTVKVVDELVKVMGRHKPENIVIEMARENQTTQKGQKNSRERMKRIEEGIKELGSQILKEHPVENTQLQNEKLYLYYLQNGRDMYVDQELDINRLSDYDVDHIVPQSFLKDDSIDNKVLTRSDKNRGKSDNVPSEEVVKKMKNYWRQLLNAKLITQRKFDNLTKAERGGLSELDKAGFIKRQLVETRQITKHVAQILDSRMNTKYDENDKLIREVKVITLKSKLVSDFRKDFQFYKVREINNYHHAHDAYLNAVVGTALIKKYPKLESEFVYGDYKVYDVRKMIAKSEQEIGKATAKYFFYSNIMNFFKTEITLANGEIRKRPLIETNGETGEIVWDKGRDFATVRKVLSMPQVNIVKKTEVQTGGFSKESILPKRNSDKLIARKKDWDPKKYGGFDSPTVAYSVLVVAKVEKGKSKKLKSVKELLGITIMERSSFEKNPIDFLEAKGYKEVKKDLIIKLPKYSLFELENGRKRMLASAGELQKGNELALPSKYVNFLYLASHYEKLKGSPEDNEQKQLFVEQHKHYLDEIIEQISEFSKRVILADANLDKVLSAYNKHRDKPIREQAENIIHLFTLTNLGAPAAFKYFDTTIDRKRYTSTKEVLDATLIHQSITGLYETRIDLSQLGGDSGGSKRTADGSEFEPKKKRKVGSG

SEQ ID NO: 265 - protein, 1608 aa, synthetic construct
MKRTADGSEFESPKKKRKVSEVEFSHEYWMRHALTLAKRARDEREVPVGAVLVLNNRVIGEGWNRAIGLHDPTAHAEIMALRQGGLVMQNYRLIDATLYVTFEPCVMCAGAMIHSRIGRVVFGVRNSKRGAAGSLMNVLNYPGMNHRVEITEGILADECAALLCDFYRMPRQVFNAQKKAQSSINSGGSSGGSSGSETPGTSESATPESSGGSSGGSDKKYSIGLAIGTNSVGWAVITDEYKVPSKKFKVLGNTDRHSIKKNLIGALLFDSGETAEATRLKRTARRRYTRRKNRICYLQEIFSNEMAKVDDSFFHRLEESFLVEEDKKHERHPIFGNIVDEVAYHEKYPTIYHLRKKLVDSTDKADLRLIYLALAHMIKFRGHFLIEGDLNPDNSDVDKLFIQLVQTYNQLFEENPINASGVDAKAILSARLSKSRRLENLIAQLPGEKKNGLFGNLIALSLGLTPNFKSNFDLAEDAKLQLSKDTYDDDLDNLLAQIGDQYADLFLAAKNLSDAILLSDILRVNTEITKAPLSASMIKRYDEHHQDLTLLKALVRQQLPEKYKEIFFDQSKNGYAGYIDGGASQEEFYKFIKPILEKMDGTEELLVKLNREDLLRKQRTFDNGSIPHQIHLGELHAILRRQEDFYPFLKDNREKIEKILTFRIPYYVGPLARGNSRFAWMTRKSEETITPWNFEEVVDKGASAQSFIERMTNFDKNLPNEKVLPKHSLLYEYFTVYNELTKVKYVTEGMRKPAFLSGEQKKAIVDLLFKTNRKVTVKQLKEDYFKKIECFDSVEISGVEDRFNASLGTYHDLLKIIKDKDFLDNEENEDILEDIVLTLTLFEDREMIEERLKTYAHLFDDKVMKQLKRRRYTGWGRLSRKLINGIRDKQSGKTILDFLKSDGFANRNFMQLIHDDSLTFKEDIQKAQVSGQGDSLHEHIANLAGSPAIKKGILQTVKVVDELVKVMGRHKPENIVIEMARENQTTQKGQKNSRERMKRIEEGIKELGSQILKEHPVENTQLQNEKLYLYYLQNGRDMYVDQELDINRLSDYDVDHIVPQSFLKDDSIDNKVLTRSDKNRGKSDNVPSEEVVKKMKNYWRQLLNAKLITQRKFDNLTKAERGGLSELDKAGFIKRQLVETRQITKHVAQILDSRMNTKYDENDKLIREVKVITLKSKLVSDFRKDFQFYKVREINNYHHAHDAYLNAVVGTALIKKYPKLESEFVYGDYKVYDVRKMIAKSEQEIGKATAKYFFYSNIMNFFKTEITLANGEIRKRPLIETNGETGEIVWDKGRDFATVRKVLSMPQVNIVKKTEVQTGGFSKESILPKRNSDKLIARKKDWDPKKYGGFDSPTVAYSVLVVAKVEKGKSKKLKSVKELLGITIMERSSFEKNPIDFLEAKGYKEVKKDLIIKLPKYSLFELENGRKRMLASAGELQKGNELALPSKYVNFLYLASHYEKLKGSPEDNEQKQLFVEQHKHYLDEIIEQISEFSKRVILADANLDKVLSAYNKHRDKPIREQAENIIHLFTLTNLGAPAAFKYFDTTIDRKRYTSTKEVLDATLIHQSITGLYETRIDLSQLGGDSGGSKRTADGSEFEPKKKRKVGSG

SEQ ID NO: 266 - DNA, 5574 bp, synthetic construct
  source 1..5574: mol_type = other DNA
atgaaacggacagccgacggaagcgagttcgagtcaccaaagaagaagcggaaagtctctgaagtcgagtttagccacgagtattggatgaggcacgcactgaccctggcaaagcgagcatgggatgaaagagaagtccccgtgggcgccgtgctggtgcacaacaatagagtgatcggagagggatggaacaggccaatcggccgccacgaccctaccgcacacgcagagatcatggcactgaggcagggaggcctggtcatgcagaattaccgcctgatcgatgccaccctgtatgtgacactggagccatgcgtgatgtgcgcaggagcaatgatccacagcaggatcggaagagtggtgttcggagcacgggacgccaagaccggcgcagcaggctccctgatggatgtgctgcaccaccccggcatgaaccaccgggtggagatcacagagggaatcctggcagacgagtgcgccgccctgctgagcgatttctttagaatgcggagacaggagatcaaggcccagaagaaggcacagagctccaccgactctggaggatctagcggaggatcctctggaagcgagacaccaggcacaagcgagtccgccacaccagagagctccggcggctcctccggaggatcctctgaggtggagttttcccacgagtactggatgagacatgccctgaccctggccaagagggcacgcgatgagagggaggtgcctgtgggagccgtgctggtgctgaacaatagagtgatcggcgagggctggaacagagccatcggcctgcacgacccaacagcccatgccgaaattatggccctgagacagggcggcctggtcatgcagaactacagactgattgacgccaccctgtacgtgacattcgagccttgcgtgatgtgcgccggcgccatgatccactctaggatcggccgcgtggtgtttggcgtgaggaacgcaaaaaccggcgccgcaggctccctgatggacgtgctgcactaccccggcatgaatcaccgcgtcgaaattaccgagggaatcctggcagatgaatgtgccgccctgctgtgctatttctttcggatgcctagacaggtgttcaatgctcagaagaaggcccagagctccaccgactccggaggatctagcggaggctcctctggctctgagacacctggcacaagcgagagcgcaacacctgaaagcagcgggggcagcagcggggggtcagacaagaagtacagcatcggcctggccatcggcaccaactctgtgggctgggccgtgatcaccgacgagtacaaggtgcccagcaagaaattcaaggtgctgggcaacaccgaccggcacagcatcaagaagaacctgatcggagccctgctgttcgacagcggcgaaacagccgaggccacccggctgaagagaaccgccagaagaagatacaccagacggaagaaccggatctgctatctgcaagagatcttcagcaacgagatggccaaggtggacgacagcttcttccacagactggaagagtccttcctggtggaagaggataagaagcacgagcggcaccccatcttcggcaacatcgtggacgaggtggcctaccacgagaagtaccccaccatctaccacctgagaaagaaactggtggacagcaccgacaaggccgacctgcggctgatctatctggccctggcccacatgatcaagttccggggccacttcctgatcgagggcgacctgaaccccgacaacagcgacgtggacaagctgttcatccagctggtgcagacctacaaccagctgttcgaggaaaaccccatcaacgccagcggcgtggacgccaaggccatcctgtctgccagactgagcaagagcagacggctggaaaatctgatcgcccagctgcccggcgagaagaagaatggcctgttcggaaacctgattgccctgagcctgggcctgacccccaacttcaagagcaacttcgacctggccgaggatgccaaactgcagctgagcaaggacacctacgacgacgacctggacaacctgctggcccagatcggcgaccagtacgccgacctgtttctggccgccaagaacctgtccgacgccatcctgctgagcgacatcctgagagtgaacaccgagatcaccaaggcccccctgagcgcctctatgatcaagagatacgacgagcaccaccaggacctgaccctgctgaaagctctcgtgcggcagcagctgcctgagaagtacaaagagattttcttcgaccagagcaagaacggctacgccggctacattgacggcggagccagccaggaagagttctacaagttcatcaagcccatcctggaaaagatggacggcaccgaggaactgctcgtgaagctgaacagagaggacctgctgcggaagcagcggaccttcgacaacggcagcatcccccaccagatccacctgggagagctgcacgccattctgcggcggcaggaagatttttacccattcctgaaggacaaccgggaaaagatcgagaagatcctgaccttccgcatcccctactacgtgggccctctggccaggggaaacagcagattcgcctggatgaccagaaagagcgaggaaaccatcaccccctggaacttcgaggaagtggtggacaagggcgcttccgcccagagcttcatcgagcggatgaccaacttcgataagaacctgcccaacgagaaggtgctgcccaagcacagcctgctgtacgagtacttcaccgtgtataacgagctgaccaaagtgaaatacgtgaccgagggaatgagaaagcccgccttcctgagcggcgagcagaaaaaggccatcgtggacctgctgttcaagaccaaccggaaagtgaccgtgaagcagctgaaagaggactacttcaagaaaatcgagtgcttcgactccgtggaaatctccggcgtggaagatcggttcaacgcctccctgggcacataccacgatctgctgaaaattatcaaggacaaggacttcctggacaatgaggaaaacgaggacattctggaagatatcgtgctgaccctgacactgtttgaggacagagagatgatcgaggaacggctgaaaacctatgcccacctgttcgacgacaaagtgatgaagcagctgaagcggcggagatacaccggctggggcaggctgagccggaagctgatcaacggcatccgggacaagcagtccggcaagacaatcctggatttcctgaagtccgacggcttcgccaacagaaacttcatgcagctgatccacgacgacagcctgacctttaaagaggacatccagaaagcccaggtgtccggccagggcgatagcctgcacgagcacattgccaatctggccggcagccccgccattaagaagggcatcctgcagacagtgaaggtggtggacgagctcgtgaaagtgatgggccggcacaagcccgagaacatcgtgatcgaaatggccagagagaaccagaccacccagaagggacagaagaacagccgcgagagaatgaagcggatcgaagagggcatcaaagagctgggcagccagatcctgaaagaacaccccgtggaaaacacccagctgcagaacgagaagctgtacctgtactacctgcagaatgggcgggatatgtacgtggaccaggaactggacatcaaccggctgtccgactacgatgtggaccatatcgtgcctcagagctttctgaaggacgactccatcgacaacaaggtgctgaccagaagcgacaagaaccggggcaagagcgacaacgtgccctccgaagaggtcgtgaagaagatgaagaactactggcggcagctgctgaacgccaagctgattacccagagaaagttcgacaatctgaccaaggccgagagaggcggcctgagcgaactggataaggccggcttcatcaagagacagctggtggaaacccggcagatcacaaagcacgtggcacagatcctggactcccggatgaacactaagtacgacgagaatgacaagctgatccgggaagtgaaagtgatcaccctgaagtccaagctggtgtccgatttccggaaggatttccagttttacaaagtgcgcgagatcaacaactaccaccacgcccacgacgcctacctgaacgccgtcgtgggaaccgccctgatcaaaaagtaccctaagctggaaagcgagttcgtgtacggcgactacaaggtgtacgacgtgcggaagatgatcgccaagagcgagcaggaaatcggcaaggctaccgccaagtacttcttctacagcaacatcatgaactttttcaagaccgagattaccctggccaacggcgagatccggaagcggcctctgatcgagacaaacggcgaaaccggggagatcgtgtgggataagggccgggattttgccaccgtgcggaaagtgctgagcatgccccaagtgaatatcgtgaaaaagaccgaggtgcagacaggcggcttcagcaaagagtctatcctgcccaagaggaacagcgataagctgatcgccagaaagaaggactgggaccctaagaagtacggcggcttcgacagccccaccgtggcctattctgtgctggtggtggccaaagtggaaaagggcaagtccaagaaactgaagagtgtgaaagagctgctggggatcaccatcatggaaagaagcagcttcgagaagaatcccatcgactttctggaagccaagggctacaaagaagtgaaaaaggacctgatcatcaagctgcctaagtactccctgttcgagctggaaaacggccggaagagaatgctggcctctgccggcgaactgcagaagggaaacgaactggccctgccctccaaatatgtgaacttcctgtacctggccagccactatgagaagctgaagggctcccccgaggataatgagcagaaacagctgtttgtggaacagcacaagcactacctggacgagatcatcgagcagatcagcgagttctccaagagagtgatcctggccgacgctaatctggacaaagtgctgtccgcctacaacaagcaccgggataagcccatcagagagcaggccgagaatatcatccacctgtttaccctgaccaatctgggagcccctgccgccttcaagtactttgacaccaccatcgaccggaagaggtacaccagcaccaaagaggtgctggacgccaccctgatccaccagagcatcaccggcctgtacgagacacggatcgacctgtctcagctgggaggtgactctggcggctcaaaaagaaccgccgacggcagcgaattcgagggtagttccggcgggtcaagtgggggaggctccagtgggagtagcggaggtggaagtggtggctctggttctggtgggggcagtggggggtccgccccgcctggaatgaggttgcgctctggcagatccacaggtgccccccttacgcgaggaagccccaagaagaagaggaaagtcggaagcgga

SEQ ID NO: 267 - DNA, 4980 bp, synthetic construct
  source 1..4980: mol_type = other DNA
atgaaacggacagccgacggaagcgagttcgagtcaccaaagaagaagcggaaagtctctgaggttgaattttcacatgagtattggatgagacacgctcttaccttggctaagagagcaagggatgagagagaagttccagtgggagcagttcttgtgttgaacaatagagttattggagagggttggaacagggctattggacttcatgatcctactgctcacgcagaaattatggcacttagacaaggtggacttgttatgcagaactacaggcttatcgatgctactctttatgttacattcgagccatgtgtgatgtgcgctggagcaatgattcattctaggattggaagggttgtgttcggtgttagaaactctaagaggggagctgcaggttcacttatgaacgttttgaattatcctggtatgaaccacagagtggagattactgaaggtattttggcagatgaatgtgctgcacttttgtgcgatttttacagaatgcctagacaagtgttcaacgctcaaaagaaggcacaatcttctattaactccggaggatctagcggaggctcctctggctctgagacacctggcacaagcgagagcgcaacacctgaaagcagcgggggcagcagcggggggtcagacaagaagtacagcatcggcctggccatcggcaccaactctgtgggctgggccgtgatcaccgacgagtacaaggtgcccagcaagaaattcaaggtgctgggcaacaccgaccggcacagcatcaagaagaacctgatcggagccctgctgttcgacagcggcgaaacagccgaggccacccggctgaagagaaccgccagaagaagatacaccagacggaagaaccggatctgctatctgcaagagatcttcagcaacgagatggccaaggtggacgacagcttcttccacagactggaagagtccttcctggtggaagaggataagaagcacgagcggcaccccatcttcggcaacatcgtggacgaggtggcctaccacgagaagtaccccaccatctaccacctgagaaagaaactggtggacagcaccgacaaggccgacctgcggctgatctatctggccctggcccacatgatcaagttccggggccacttcctgatcgagggcgacctgaaccccgacaacagcgacgtggacaagctgttcatccagctggtgcagacctacaaccagctgttcgaggaaaaccccatcaacgccagcggcgtggacgccaaggccatcctgtctgccagactgagcaagagcagacggctggaaaatctgatcgcccagctgcccggcgagaagaagaatggcctgttcggaaacctgattgccctgagcctgggcctgacccccaacttcaagagcaacttcgacctggccgaggatgccaaactgcagctgagcaaggacacctacgacgacgacctggacaacctgctggcccagatcggcgaccagtacgccgacctgtttctggccgccaagaacctgtccgacgccatcctgctgagcgacatcctgagagtgaacaccgagatcaccaaggcccccctgagcgcctctatgatcaagagatacgacgagcaccaccaggacctgaccctgctgaaagctctcgtgcggcagcagctgcctgagaagtacaaagagattttcttcgaccagagcaagaacggctacgccggctacattgacggcggagccagccaggaagagttctacaagttcatcaagcccatcctggaaaagatggacggcaccgaggaactgctcgtgaagctgaacagagaggacctgctgcggaagcagcggaccttcgacaacggcagcatcccccaccagatccacctgggagagctgcacgccattctgcggcggcaggaagatttttacccattcctgaaggacaaccgggaaaagatcgagaagatcctgaccttccgcatcccctactacgtgggccctctggccaggggaaacagcagattcgcctggatgaccagaaagagcgaggaaaccatcaccccctggaacttcgaggaagtggtggacaagggcgcttccgcccagagcttcatcgagcggatgaccaacttcgataagaacctgcccaacgagaaggtgctgcccaagcacagcctgctgtacgagtacttcaccgtgtataacgagctgaccaaagtgaaatacgtgaccgagggaatgagaaagcccgccttcctgagcggcgagcagaaaaaggccatcgtggacctgctgttcaagaccaaccggaaagtgaccgtgaagcagctgaaagaggactacttcaagaaaatcgagtgcttcgactccgtggaaatctccggcgtggaagatcggttcaacgcctccctgggcacataccacgatctgctgaaaattatcaaggacaaggacttcctggacaatgaggaaaacgaggacattctggaagatatcgtgctgaccctgacactgtttgaggacagagagatgatcgaggaacggctgaaaacctatgcccacctgttcgacgacaaagtgatgaagcagctgaagcggcggagatacaccggctggggcaggctgagccggaagctgatcaacggcatccgggacaagcagtccggcaagacaatcctggatttcctgaagtccgacggcttcgccaacagaaacttcatgcagctgatccacgacgacagcctgacctttaaagaggacatccagaaagcccaggtgtccggccagggcgatagcctgcacgagcacattgccaatctggccggcagccccgccattaagaagggcatcctgcagacagtgaaggtggtggacgagctcgtgaaagtgatgggccggcacaagcccgagaacatcgtgatcgaaatggccagagagaaccagaccacccagaagggacagaagaacagccgcgagagaatgaagcggatcgaagagggcatcaaagagctgggcagccagatcctgaaagaacaccccgtggaaaacacccagctgcagaacgagaagctgtacctgtactacctgcagaatgggcgggatatgtacgtggaccaggaactggacatcaaccggctgtccgactacgatgtggaccatatcgtgcctcagagctttctgaaggacgactccatcgacaacaaggtgctgaccagaagcgacaagaaccggggcaagagcgacaacgtgccctccgaagaggtcgtgaagaagatgaagaactactggcggcagctgctgaacgccaagctgattacccagagaaagttcgacaatctgaccaaggccgagagaggcggcctgagcgaactggataaggccggcttcatcaagagacagctggtggaaacccggcagatcacaaagcacgtggcacagatcctggactcccggatgaacactaagtacgacgagaatgacaagctgatccgggaagtgaaagtgatcaccctgaagtccaagctggtgtccgatttccggaaggatttccagttttacaaagtgcgcgagatcaacaactaccaccacgcccacgacgcctacctgaacgccgtcgtgggaaccgccctgatcaaaaagtaccctaagctggaaagcgagttcgtgtacggcgactacaaggtgtacgacgtgcggaagatgatcgccaagagcgagcaggaaatcggcaaggctaccgccaagtacttcttctacagcaacatcatgaactttttcaagaccgagattaccctggccaacggcgagatccggaagcggcctctgatcgagacaaacggcgaaaccggggagatcgtgtgggataagggccgggattttgccaccgtgcggaaagtgctgagcatgccccaagtgaatatcgtgaaaaagaccgaggtgcagacaggcggcttcagcaaagagtctatcctgcccaagaggaacagcgataagctgatcgccagaaagaaggactgggaccctaagaagtacggcggcttcgacagccccaccgtggcctattctgtgctggtggtggccaaagtggaaaagggcaagtccaagaaactgaagagtgtgaaagagctgctggggatcaccatcatggaaagaagcagcttcgagaagaatcccatcgactttctggaagccaagggctacaaagaagtgaaaaaggacctgatcatcaagctgcctaagtactccctgttcgagctggaaaacggccggaagagaatgctggcctctgccggcgaactgcagaagggaaacgaactggccctgccctccaaatatgtgaacttcctgtacctggccagccactatgagaagctgaagggctcccccgaggataatgagcagaaacagctgtttgtggaacagcacaagcactacctggacgagatcatcgagcagatcagcgagttctccaagagagtgatcctggccgacgctaatctggacaaagtgctgtccgcctacaacaagcaccgggataagcccatcagagagcaggccgagaatatcatccacctgtttaccctgaccaatctgggagcccctgccgccttcaagtactttgacaccaccatcgaccggaagaggtacaccagcaccaaagaggtgctggacgccaccctgatccaccagagcatcaccggcctgtacgagacacggatcgacctgtctcagctgggaggtgactctggcggctcaaaaagaaccgccgacggcagcgaattcgagggtagttccggcgggtcaagtgggggaggctccagtgggagtagcggaggtggaagtggtggctctggttctggtgggggcagtggggggtccgccccgcctggaatgaggttgcgctctggcagatccacaggtgccccccttacgcgaggaagccccaagaagaagaggaaagtcggaagcgga

SEQ ID NO: 268 - DNA, 5619 bp, synthetic construct
  source 1..5619: mol_type = other DNA
atgaaacggacagccgacggaagcgagttcgagtcaccaaagaagaagcggaaagtctctgaagtcgagtttagccacgagtattggatgaggcacgcactgaccctggcaaagcgagcatgggatgaaagagaagtccccgtgggcgccgtgctggtgcacaacaatagagtgatcggagagggatggaacaggccaatcggccgccacgaccctaccgcacacgcagagatcatggcactgaggcagggaggcctggtcatgcagaattaccgcctgatcgatgccaccctgtatgtgacactggagccatgcgtgatgtgcgcaggagcaatgatccacagcaggatcggaagagtggtgttcggagcacgggacgccaagaccggcgcagcaggctccctgatggatgtgctgcaccaccccggcatgaaccaccgggtggagatcacagagggaatcctggcagacgagtgcgccgccctgctgagcgatttctttagaatgcggagacaggagatcaaggcccagaagaaggcacagagctccaccgactctggaggatctagcggaggatcctctggaagcgagacaccaggcacaagcgagtccgccacaccagagagctccggcggctcctccggaggatcctctgaggtggagttttcccacgagtactggatgagacatgccctgaccctggccaagagggcacgcgatgagagggaggtgcctgtgggagccgtgctggtgctgaacaatagagtgatcggcgagggctggaacagagccatcggcctgcacgacccaacagcccatgccgaaattatggccctgagacagggcggcctggtcatgcagaactacagactgattgacgccaccctgtacgtgacattcgagccttgcgtgatgtgcgccggcgccatgatccactctaggatcggccgcgtggtgtttggcgtgaggaacgcaaaaaccggcgccgcaggctccctgatggacgtgctgcactaccccggcatgaatcaccgcgtcgaaattaccgagggaatcctggcagatgaatgtgccgccctgctgtgctatttctttcggatgcctagacaggtgttcaatgctcagaagaaggcccagagctccaccgactccggaggatctagcggaggctcctctggctctgagacacctggcacaagcgagagcgcaacacctgaaagcagcgggggcagcagcggggggtcagacaagaagtacagcatcggcctggccatcggcaccaactctgtgggctgggccgtgatcaccgacgagtacaaggtgcccagcaagaaattcaaggtgctgggcaacaccgaccggcacagcatcaagaagaacctgatcggagccctgctgttcgacagcggcgaaacagccgaggccacccggctgaagagaaccgccagaagaagatacaccagacggaagaaccggatctgctatctgcaagagatcttcagcaacgagatggccaaggtggacgacagcttcttccacagactggaagagtccttcctggtggaagaggataagaagcacgagcggcaccccatcttcggcaacatcgtggacgaggtggcctaccacgagaagtaccccaccatctaccacctgagaaagaaactggtggacagcaccgacaaggccgacctgcggctgatctatctggccctggcccacatgatcaagttccggggccacttcctgatcgagggcgacctgaaccccgacaacagcgacgtggacaagctgttcatccagctggtgcagacctacaaccagctgttcgaggaaaaccccatcaacgccagcggcgtggacgccaaggccatcctgtctgccagactgagcaagagcagacggctggaaaatctgatcgcccagctgcccggcgagaagaagaatggcctgttcggaaacctgattgccctgagcctgggcctgacccccaacttcaagagcaacttcgacctggccgaggatgccaaactgcagctgagcaaggacacctacgacgacgacctggacaacctgctggcccagatcggcgaccagtacgccgacctgtttctggccgccaagaacctgtccgacgccatcctgctgagcgacatcctgagagtgaacaccgagatcaccaaggcccccctgagcgcctctatgatcaagagatacgacgagcaccaccaggacctgaccctgctgaaagctctcgtgcggcagcagctgcctgagaagtacaaagagattttcttcgaccagagcaagaacggctacgccggctacattgacggcggagccagccaggaagagttctacaagttcatcaagcccatcctggaaaagatggacggcaccgaggaactgctcgtgaagctgaacagagaggacctgctgcggaagcagcggaccttcgacaacggcagcatcccccaccagatccacctgggagagctgcacgccattctgcggcggcaggaagatttttacccattcctgaaggacaaccgggaaaagatcgagaagatcctgaccttccgcatcccctactacgtgggccctctggccaggggaaacagcagattcgcctggatgaccagaaagagcgaggaaaccatcaccccctggaacttcgaggaagtggtggacaagggcgcttccgcccagagcttcatcgagcggatgaccaacttcgataagaacctgcccaacgagaaggtgctgcccaagcacagcctgctgtacgagtacttcaccgtgtataacgagctgaccaaagtgaaatacgtgaccgagggaatgagaaagcccgccttcctgagcggcgagcagaaaaaggccatcgtggacctgctgttcaagaccaaccggaaagtgaccgtgaagcagctgaaagaggactacttcaagaaaatcgagtgcttcgactccgtggaaatctccggcgtggaagatcggttcaacgcctccctgggcacataccacgatctgctgaaaattatcaaggacaaggacttcctggacaatgaggaaaacgaggacattctggaagatatcgtgctgaccctgacactgtttgaggacagagagatgatcgaggaacggctgaaaacctatgcccacctgttcgacgacaaagtgatgaagcagctgaagcggcggagatacaccggctggggcaggctgagccggaagctgatcaacggcatccgggacaagcagtccggcaagacaatcctggatttcctgaagtccgacggcttcgccaacagaaacttcatgcagctgatccacgacgacagcctgacctttaaagaggacatccagaaagcccaggtgtccggccagggcgatagcctgcacgagcacattgccaatctggccggcagccccgccattaagaagggcatcctgcagacagtgaaggtggtggacgagctcgtgaaagtgatgggccggcacaagcccgagaacatcgtgatcgaaatggccagagagaaccagaccacccagaagggacagaagaacagccgcgagagaatgaagcggatcgaagagggcatcaaagagctgggcagccagatcctgaaagaacaccccgtggaaaacacccagctgcagaacgagaagctgtacctgtactacctgcagaatgggcgggatatgtacgtggaccaggaactggacatcaaccggctgtccgactacgatgtggaccatatcgtgcctcagagctttctgaaggacgactccatcgacaacaaggtgctgaccagaagcgacaagaaccggggcaagagcgacaacgtgccctccgaagaggtcgtgaagaagatgaagaactactggcggcagctgctgaacgccaagctgattacccagagaaagttcgacaatctgaccaaggccgagagaggcggcctgagcgaactggataaggccggcttcatcaagagacagctggtggaaacccggcagatcacaaagcacgtggcacagatcctggactcccggatgaacactaagtacgacgagaatgacaagctgatccgggaagtgaaagtgatcaccctgaagtccaagctggtgtccgatttccggaaggatttccagttttacaaagtgcgcgagatcaacaactaccaccacgcccacgacgcctacctgaacgccgtcgtgggaaccgccctgatcaaaaagtaccctaagctggaaagcgagttcgtgtacggcgactacaaggtgtacgacgtgcggaagatgatcgccaagagcgagcaggaaatcggcaaggctaccgccaagtacttcttctacagcaacatcatgaactttttcaagaccgagattaccctggccaacggcgagatccggaagcggcctctgatcgagacaaacggcgaaaccggggagatcgtgtgggataagggccgggattttgccaccgtgcggaaagtgctgagcatgccccaagtgaatatcgtgaaaaagaccgaggtgcagacaggcggcttcagcaaagagtctatcctgcccaagaggaacagcgataagctgatcgccagaaagaaggactgggaccctaagaagtacggcggcttcgacagccccaccgtggcctattctgtgctggtggtggccaaagtggaaaagggcaagtccaagaaactgaagagtgtgaaagagctgctggggatcaccatcatggaaagaagcagcttcgagaagaatcccatcgactttctggaagccaagggctacaaagaagtgaaaaaggacctgatcatcaagctgcctaagtactccctgttcgagctggaaaacggccggaagagaatgctggcctctgccggcgaactgcagaagggaaacgaactggccctgccctccaaatatgtgaacttcctgtacctggccagccactatgagaagctgaagggctcccccgaggataatgagcagaaacagctgtttgtggaacagcacaagcactacctggacgagatcatcgagcagatcagcgagttctccaagagagtgatcctggccgacgctaatctggacaaagtgctgtccgcctacaacaagcaccgggataagcccatcagagagcaggccgagaatatcatccacctgtttaccctgaccaatctgggagcccctgccgccttcaagtactttgacaccaccatcgaccggaagaggtacaccagcaccaaagaggtgctggacgccaccctgatccaccagagcatcaccggcctgtacgagacacggatcgacctgtctcagctgggaggtgactctggcggctcaaaaagaaccgccgacggcagcgaattcgagggtagttccggcgggtcaagtgggggaggctccagtgggagtagcggaggtggaagtggtggctctggttctggtgggggcagtggggggtccgaacccgaagaggagagaatacggtactcacaaagactccgcgggacaatgcgcaggagatacgaggatgacgggatatccgacgatgagatcgagggcaagggaagtcccaagaagaagaggaaagtcggaagcgga

SEQ ID NO: 269 - DNA, 5025 bp, synthetic construct
  source 1..5025: mol_type = other DNA
atgaaacggacagccgacggaagcgagttcgagtcaccaaagaagaagcggaaagtctctgaggttgaattttcacatgagtattggatgagacacgctcttaccttggctaagagagcaagggatgagagagaagttccagtgggagcagttcttgtgttgaacaatagagttattggagagggttggaacagggctattggacttcatgatcctactgctcacgcagaaattatggcacttagacaaggtggacttgttatgcagaactacaggcttatcgatgctactctttatgttacattcgagccatgtgtgatgtgcgctggagcaatgattcattctaggattggaagggttgtgttcggtgttagaaactctaagaggggagctgcaggttcacttatgaacgttttgaattatcctggtatgaaccacagagtggagattactgaaggtattttggcagatgaatgtgctgcacttttgtgcgatttttacagaatgcctagacaagtgttcaacgctcaaaagaaggcacaatcttctattaactccggaggatctagcggaggctcctctggctctgagacacctggcacaagcgagagcgcaacacctgaaagcagcgggggcagcagcggggggtcagacaagaagtacagcatcggcctggccatcggcaccaactctgtgggctgggccgtgatcaccgacgagtacaaggtgcccagcaagaaattcaaggtgctgggcaacaccgaccggcacagcatcaagaagaacctgatcggagccctgctgttcgacagcggcgaaacagccgaggccacccggctgaagagaaccgccagaagaagatacaccagacggaagaaccggatctgctatctgcaagagatcttcagcaacgagatggccaaggtggacgacagcttcttccacagactggaagagtccttcctggtggaagaggataagaagcacgagcggcaccccatcttcggcaacatcgtggacgaggtggcctaccacgagaagtaccccaccatctaccacctgagaaagaaactggtggacagcaccgacaaggccgacctgcggctgatctatctggccctggcccacatgatcaagttccggggccacttcctgatcgagggcgacctgaaccccgacaacagcgacgtggacaagctgttcatccagctggtgcagacctacaaccagctgttcgaggaaaaccccatcaacgccagcggcgtggacgccaaggccatcctgtctgccagactgagcaagagcagacggctggaaaatctgatcgcccagctgcccggcgagaagaagaatggcctgttcggaaacctgattgccctgagcctgggcctgacccccaacttcaagagcaacttcgacctggccgaggatgccaaactgcagctgagcaaggacacctacgacgacgacctggacaacctgctggcccagatcggcgaccagtacgccgacctgtttctggccgccaagaacctgtccgacgccatcctgctgagcgacatcctgagagtgaacaccgagatcaccaaggcccccctgagcgcctctatgatcaagagatacgacgagcaccaccaggacctgaccctgctgaaagctctcgtgcggcagcagctgcctgagaagtacaaagagattttcttcgaccagagcaagaacggctacgccggctacattgacggcggagccagccaggaagagttctacaagttcatcaagcccatcctggaaaagatggacggcaccgaggaactgctcgtgaagctgaacagagaggacctgctgcggaagcagcggaccttcgacaacggcagcatcccccaccagatccacctgggagagctgcacgccattctgcggcggcaggaagatttttacccattcctgaaggacaaccgggaaaagatcgagaagatcctgaccttccgcatcccctactacgtgggccctctggccaggggaaacagcagattcgcctggatgaccagaaagagcgaggaaaccatcaccccctggaacttcgaggaagtggtggacaagggcgcttccgcccagagcttcatcgagcggatgaccaacttcgataagaacctgcccaacgagaaggtgctgcccaagcacagcctgctgtacgagtacttcaccgtgtataacgagctgaccaaagtgaaatacgtgaccgagggaatgagaaagcccgccttcctgagcggcgagcagaaaaaggccatcgtggacctgctgttcaagaccaaccggaaagtgaccgtgaagcagctgaaagaggactacttcaagaaaatcgagtgcttcgactccgtggaaatctccggcgtggaagatcggttcaacgcctccctgggcacataccacgatctgctgaaaattatcaaggacaaggacttcctggacaatgaggaaaacgaggacattctggaagatatcgtgctgaccctgacactgtttgaggacagagagatgatcgaggaacggctgaaaacctatgcccacctgttcgacgacaaagtgatgaagcagctgaagcggcggagatacaccggctggggcaggctgagccggaagctgatcaacggcatccgggacaagcagtccggcaagacaatcctggatttcctgaagtccgacggcttcgccaacagaaacttcatgcagctgatccacgacgacagcctgacctttaaagaggacatccagaaagcccaggtgtccggccagggcgatagcctgcacgagcacattgccaatctggccggcagccccgccattaagaagggcatcctgcagacagtgaaggtggtggacgagctcgtgaaagtgatgggccggcacaagcccgagaacatcgtgatcgaaatggccagagagaaccagaccacccagaagggacagaagaacagccgcgagagaatgaagcggatcgaagagggcatcaaagagctgggcagccagatcctgaaagaacaccccgtggaaaacacccagctgcagaacgagaagctgtacctgtactacctgcagaatgggcgggatatgtacgtggaccaggaactggacatcaaccggctgtccgactacgatgtggaccatatcgtgcctcagagctttctgaaggacgactccatcgacaacaaggtgctgaccagaagcgacaagaaccggggcaagagcgacaacgtgccctccgaagaggtcgtgaagaagatgaagaactactggcggcagctgctgaacgccaagctgattacccagagaaagttcgacaatctgaccaaggccgagagaggcggcctgagcgaactggataaggccggcttcatcaagagacagctggtggaaacccggcagatcacaaagcacgtggcacagatcctggactcccggatgaacactaagtacgacgagaatgacaagctgatccgggaagtgaaagtgatcaccctgaagtccaagctggtgtccgatttccggaaggatttccagttttacaaagtgcgcgagatcaacaactaccaccacgcccacgacgcctacctgaacgccgtcgtgggaaccgccctgatcaaaaagtaccctaagctggaaagcgagttcgtgtacggcgactacaaggtgtacgacgtgcggaagatgatcgccaagagcgagcaggaaatcggcaaggctaccgccaagtacttcttctacagcaacatcatgaactttttcaagaccgagattaccctggccaacggcgagatccggaagcggcctctgatcgagacaaacggcgaaaccggggagatcgtgtgggataagggccgggattttgccaccgtgcggaaagtgctgagcatgccccaagtgaatatcgtgaaaaagaccgaggtgcagacaggcggcttcagcaaagagtctatcctgcccaagaggaacagcgataagctgatcgccagaaagaaggactgggaccctaagaagtacggcggcttcgacagccccaccgtggcctattctgtgctggtggtggccaaagtggaaaagggcaagtccaagaaactgaagagtgtgaaagagctgctggggatcaccatcatggaaagaagcagcttcgagaagaatcccatcgactttctggaagccaagggctacaaagaagtgaaaaaggacctgatcatcaagctgcctaagtactccctgttcgagctggaaaacggccggaagagaatgctggcctctgccggcgaactgcagaagggaaacgaactggccctgccctccaaatatgtgaacttcctgtacctggccagccactatgagaagctgaagggctcccccgaggataatgagcagaaacagctgtttgtggaacagcacaagcactacctggacgagatcatcgagcagatcagcgagttctccaagagagtgatcctggccgacgctaatctggacaaagtgctgtccgcctacaacaagcaccgggataagcccatcagagagcaggccgagaatatcatccacctgtttaccctgaccaatctgggagcccctgccgccttcaagtactttgacaccaccatcgaccggaagaggtacaccagcaccaaagaggtgctggacgccaccctgatccaccagagcatcaccggcctgtacgagacacggatcgacctgtctcagctgggaggtgactctggcggctcaaaaagaaccgccgacggcagcgaattcgagggtagttccggcgggtcaagtgggggaggctccagtgggagtagcggaggtggaagtggtggctctggttctggtgggggcagtggggggtccgaacccgaagaggagagaatacggtactcacaaagactccgcgggacaatgcgcaggagatacgaggatgacgggatatccgacgatgagatcgagggcaagggaagtcccaagaagaagaggaaagtcggaagcgga

SEQ ID NO: 270 - DNA, 4386 bp, synthetic construct
  source 1..4386: mol_type = other DNA
atgaaacggacagccgacggaagcgagttcgagtcaccaaagaagaagcggaaagtcgacaagaagtacagcatcggcctggacatcggcaccaactctgtgggctgggccgtgatcaccgacgagtacaaggtgcccagcaagaaattcaaggtgctgggcaacaccgaccggcacagcatcaagaagaacctgatcggagccctgctgttcgacagcggcgaaacagccgaggccacccggctgaagagaaccgccagaagaagatacaccagacggaagaaccggatctgctatctgcaagagatcttcagcaacgagatggccaaggtggacgacagcttcttccacagactggaagagtccttcctggtggaagaggataagaagcacgagcggcaccccatcttcggcaacatcgtggacgaggtggcctaccacgagaagtaccccaccatctaccacctgagaaagaaactggtggacagcaccgacaaggccgacctgcggctgatctatctggccctggcccacatgatcaagttccggggccacttcctgatcgagggcgacctgaaccccgacaacagcgacgtggacaagctgttcatccagctggtgcagacctacaaccagctgttcgaggaaaaccccatcaacgccagcggcgtggacgccaaggccatcctgtctgccagactgagcaagagcagacggctggaaaatctgatcgcccagctgcccggcgagaagaagaatggcctgttcggaaacctgattgccctgagcctgggcctgacccccaacttcaagagcaacttcgacctggccgaggatgccaaactgcagctgagcaaggacacctacgacgacgacctggacaacctgctggcccagatcggcgaccagtacgccgacctgtttctggccgccaagaacctgtccgacgccatcctgctgagcgacatcctgagagtgaacaccgagatcaccaaggcccccctgagcgcctctatgatcaagagatacgacgagcaccaccaggacctgaccctgctgaaagctctcgtgcggcagcagctgcctgagaagtacaaagagattttcttcgaccagagcaagaacggctacgccggctacattgacggcggagccagccaggaagagttctacaagttcatcaagcccatcctggaaaagatggacggcaccgaggaactgctcgtgaagctgaacagagaggacctgctgcggaagcagcggaccttcgacaacggcagcatcccccaccagatccacctgggagagctgcacgccattctgcggcggcaggaagatttttacccattcctgaaggacaaccgggaaaagatcgagaagatcctgaccttccgcatcccctactacgtgggccctctggccaggggaaacagcagattcgcctggatgaccagaaagagcgaggaaaccatcaccccctggaacttcgaggaagtggtggacaagggcgcttccgcccagagcttcatcgagcggatgaccaacttcgataagaacctgcccaacgagaaggtgctgcccaagcacagcctgctgtacgagtacttcaccgtgtataacgagctgaccaaagtgaaatacgtgaccgagggaatgagaaagcccgccttcctgagcggcgagcagaaaaaggccatcgtggacctgctgttcaagaccaaccggaaagtgaccgtgaagcagctgaaagaggactacttcaagaaaatcgagtgcttcgactccgtggaaatctccggcgtggaagatcggttcaacgcctccctgggcacataccacgatctgctgaaaattatcaaggacaaggacttcctggacaatgaggaaaacgaggacattctggaagatatcgtgctgaccctgacactgtttgaggacagagagatgatcgaggaacggctgaaaacctatgcccacctgttcgacgacaaagtgatgaagcagctgaagcggcggagatacaccggctggggcaggctgagccggaagctgatcaacggcatccgggacaagcagtccggcaagacaatcctggatttcctgaagtccgacggcttcgccaacagaaacttcatgcagctgatccacgacgacagcctgacctttaaagaggacatccagaaagcccaggtgtccggccagggcgatagcctgcacgagcacattgccaatctggccggcagccccgccattaagaagggcatcctgcagacagtgaaggtggtggacgagctcgtgaaagtgatgggccggcacaagcccgagaacatcgtgatcgaaatggccagagagaaccagaccacccagaagggacagaagaacagccgcgagagaatgaagcggatcgaagagggcatcaaagagctgggcagccagatcctgaaagaacaccccgtggaaaacacccagctgcagaacgagaagctgtacctgtactacctgcagaatgggcgggatatgtacgtggaccaggaactggacatcaaccggctgtccgactacgatgtggaccatatcgtgcctcagagctttctgaaggacgactccatcgacaacaaggtgctgaccagaagcgacaagaaccggggcaagagcgacaacgtgccctccgaagaggtcgtgaagaagatgaagaactactggcggcagctgctgaacgccaagctgattacccagagaaagttcgacaatctgaccaaggccgagagaggcggcctgagcgaactggataaggccggcttcatcaagagacagctggtggaaacccggcagatcacaaagcacgtggcacagatcctggactcccggatgaacactaagtacgacgagaatgacaagctgatccgggaagtgaaagtgatcaccctgaagtccaagctggtgtccgatttccggaaggatttccagttttacaaagtgcgcgagatcaacaactaccaccacgcccacgacgcctacctgaacgccgtcgtgggaaccgccctgatcaaaaagtaccctaagctggaaagcgagttcgtgtacggcgactacaaggtgtacgacgtgcggaagatgatcgccaagagcgagcaggaaatcggcaaggctaccgccaagtacttcttctacagcaacatcatgaactttttcaagaccgagattaccctggccaacggcgagatccggaagcggcctctgatcgagacaaacggcgaaaccggggagatcgtgtgggataagggccgggattttgccaccgtgcggaaagtgctgagcatgccccaagtgaatatcgtgaaaaagaccgaggtgcagacaggcggcttcagcaaagagtctatcctgcccaagaggaacagcgataagctgatcgccagaaagaaggactgggaccctaagaagtacggcggcttcgacagccccaccgtggcctattctgtgctggtggtggccaaagtggaaaagggcaagtccaagaaactgaagagtgtgaaagagctgctggggatcaccatcatggaaagaagcagcttcgagaagaatcccatcgactttctggaagccaagggctacaaagaagtgaaaaaggacctgatcatcaagctgcctaagtactccctgttcgagctggaaaacggccggaagagaatgctggcctctgccggcgaactgcagaagggaaacgaactggccctgccctccaaatatgtgaacttcctgtacctggccagccactatgagaagctgaagggctcccccgaggataatgagcagaaacagctgtttgtggaacagcacaagcactacctggacgagatcatcgagcagatcagcgagttctccaagagagtgatcctggccgacgctaatctggacaaagtgctgtccgcctacaacaagcaccgggataagcccatcagagagcaggccgagaatatcatccacctgtttaccctgaccaatctgggagcccctgccgccttcaagtactttgacaccaccatcgaccggaagaggtacaccagcaccaaagaggtgctggacgccaccctgatccaccagagcatcaccggcctgtacgagacacggatcgacctgtctcagctgggaggtgactctggcggctcaaaaagaaccgccgacggcagcgaattcgagggtagttccggcgggtcaagtgggggaggctccagtgggagtagcggaggtggaagtggtggctctggttctggtgggggcagtggggggtccgccccgcctggaatgaggttgcgctctggcagatccacaggtgccccccttacgcgaggaagccccaagaagaagaggaaagtcggaagcgga

SEQ ID NO: 271 - DNA, 4431 bp, synthetic construct
  source 1..4431: mol_type = other DNA
atgaaacggacagccgacggaagcgagttcgagtcaccaaagaagaagcggaaagtcgacaagaagtacagcatcggcctggacatcggcaccaactctgtgggctgggccgtgatcaccgacgagtacaaggtgcccagcaagaaattcaaggtgctgggcaacaccgaccggcacagcatcaagaagaacctgatcggagccctgctgttcgacagcggcgaaacagccgaggccacccggctgaagagaaccgccagaagaagatacaccagacggaagaaccggatctgctatctgcaagagatcttcagcaacgagatggccaaggtggacgacagcttcttccacagactggaagagtccttcctggtggaagaggataagaagcacgagcggcaccccatcttcggcaacatcgtggacgaggtggcctaccacgagaagtaccccaccatctaccacctgagaaagaaactggtggacagcaccgacaaggccgacctgcggctgatctatctggccctggcccacatgatcaagttccggggccacttcctgatcgagggcgacctgaaccccgacaacagcgacgtggacaagctgttcatccagctggtgcagacctacaaccagctgttcgaggaaaaccccatcaacgccagcggcgtggacgccaaggccatcctgtctgccagactgagcaagagcagacggctggaaaatctgatcgcccagctgcccggcgagaagaagaatggcctgttcggaaacctgattgccctgagcctgggcctgacccccaacttcaagagcaacttcgacctggccgaggatgccaaactgcagctgagcaaggacacctacgacgacgacctggacaacctgctggcccagatcggcgaccagtacgccgacctgtttctggccgccaagaacctgtccgacgccatcctgctgagcgacatcctgagagtgaacaccgagatcaccaaggcccccctgagcgcctctatgatcaagagatacgacgagcaccaccaggacctgaccctgctgaaagctctcgtgcggcagcagctgcctgagaagtacaaagagattttcttcgaccagagcaagaacggctacgccggctacattgacggcggagccagccaggaagagttctacaagttcatcaagcccatcctggaaaagatggacggcaccgaggaactgctcgtgaagctgaacagagaggacctgctgcggaagcagcggaccttcgacaacggcagcatcccccaccagatccacctgggagagctgcacgccattctgcggcggcaggaagatttttacccattcctgaaggacaaccgggaaaagatcgagaagatcctgaccttccgcatcccctactacgtgggccctctggccaggggaaacagcagattcgcctggatgaccagaaagagcgaggaaaccatcaccccctggaacttcgaggaagtggtggacaagggcgcttccgcccagagcttcatcgagcggatgaccaacttcgataagaacctgcccaacgagaaggtgctgcccaagcacagcctgctgtacgagtacttcaccgtgtataacgagctgaccaaagtgaaatacgtgaccgagggaatgagaaagcccgccttcctgagcggcgagcagaaaaaggccatcgtggacctgctgttcaagaccaaccggaaagtgaccgtgaagcagctgaaagaggactacttcaagaaaatcgagtgcttcgactccgtggaaatctccggcgtggaagatcggttcaacgcctccctgggcacataccacgatctgctgaaaattatcaaggacaaggacttcctggacaatgaggaaaacgaggacattctggaagatatcgtgctgaccctgacactgtttgaggacagagagatgatcgaggaacggctgaaaacctatgcccacctgttcgacgacaaagtgatgaagcagctgaagcggcggagatacaccggctggggcaggctgagccggaagctgatcaacggcatccgggacaagcagtccggcaagacaatcctggatttcctgaagtccgacggcttcgccaacagaaacttcatgcagctgatccacgacgacagcctgacctttaaagaggacatccagaaagcccaggtgtccggccagggcgatagcctgcacgagcacattgccaatctggccggcagccccgccattaagaagggcatcctgcagacagtgaaggtggtggacgagctcgtgaaagtgatgggccggcacaagcccgagaacatcgtgatcgaaatggccagagagaaccagaccacccagaagggacagaagaacagccgcgagagaatgaagcggatcgaagagggcatcaaagagctgggcagccagatcctgaaagaacaccccgtggaaaacacccagctgcagaacgagaagctgtacctgtactacctgcagaatgggcgggatatgtacgtggaccaggaactggacatcaaccggctgtccgactacgatgtggaccatatcgtgcctcagagctttctgaaggacgactccatcgacaacaaggtgctgaccagaagcgacaagaaccggggcaagagcgacaacgtgccctccgaagaggtcgtgaagaagatgaagaactactggcggcagctgctgaacgccaagctgattacccagagaaagttcgacaatctgaccaaggccgagagaggcggcctgagcgaactggataaggccggcttcatcaagagacagctggtggaaacccggcagatcacaaagcacgtggcacagatcctggactcccggatgaacactaagtacgacgagaatgacaagctgatccgggaagtgaaagtgatcaccctgaagtccaagctggtgtccgatttccggaaggatttccagttttacaaagtgcgcgagatcaacaactaccaccacgcccacgacgcctacctgaacgccgtcgtgggaaccgccctgatcaaaaagtaccctaagctggaaagcgagttcgtgtacggcgactacaaggtgtacgacgtgcggaagatgatcgccaagagcgagcaggaaatcggcaaggctaccgccaagtacttcttctacagcaacatcatgaactttttcaagaccgagattaccctggccaacggcgagatccggaagcggcctctgatcgagacaaacggcgaaaccggggagatcgtgtgggataagggccgggattttgccaccgtgcggaaagtgctgagcatgccccaagtgaatatcgtgaaaaagaccgaggtgcagacaggcggcttcagcaaagagtctatcctgcccaagaggaacagcgataagctgatcgccagaaagaaggactgggaccctaagaagtacggcggcttcgacagccccaccgtggcctattctgtgctggtggtggccaaagtggaaaagggcaagtccaagaaactgaagagtgtgaaagagctgctggggatcaccatcatggaaagaagcagcttcgagaagaatcccatcgactttctggaagccaagggctacaaagaagtgaaaaaggacctgatcatcaagctgcctaagtactccctgttcgagctggaaaacggccggaagagaatgctggcctctgccggcgaactgcagaagggaaacgaactggccctgccctccaaatatgtgaacttcctgtacctggccagccactatgagaagctgaagggctcccccgaggataatgagcagaaacagctgtttgtggaacagcacaagcactacctggacgagatcatcgagcagatcagcgagttctccaagagagtgatcctggccgacgctaatctggacaaagtgctgtccgcctacaacaagcaccgggataagcccatcagagagcaggccgagaatatcatccacctgtttaccctgaccaatctgggagcccctgccgccttcaagtactttgacaccaccatcgaccggaagaggtacaccagcaccaaagaggtgctggacgccaccctgatccaccagagcatcaccggcctgtacgagacacggatcgacctgtctcagctgggaggtgactctggcggctcaaaaagaaccgccgacggcagcgaattcgagggtagttccggcgggtcaagtgggggaggctccagtgggagtagcggaggtggaagtggtggctctggttctggtgggggcagtggggggtccgaacccgaagaggagagaatacggtactcacaaagactccgcgggacaatgcgcaggagatacgaggatgacgggatatccgacgatgagatcgagggcaagggaagtcccaagaagaagaggaaagtcggaagcgga

SEQ ID NO: 272 - DNA, 4599 bp, synthetic construct
  source 1..4599: mol_type = other DNA
atgaaacggacagccgacggaagcgagttcgagtcaccaaagaagaagcggaaagtcagttccgaacccgaagaggagagaatacggtactcacaaagactccgcgggacaatgcgcaggagatacgaggatgacgggatatccgacgatgagatcgagggcaagggtagttccggcgggtcaagtgggggaggctccagtgggagtagcggaggtggaagtggtggctctggttctggtgggggcagtggggggtcctccaagcttgagaagtttacaaactgttacagcctctccaaaaccctcaggtttaaagcgatcccggtgggcaagacccaggagaacatcgacaacaagaggctcctggtggaagacgagaagcgcgccgaagactacaagggcgtgaagaagctgctcgataggtactacctcagctttattaacgacgtgctgcacagcatcaaactcaagaatctcaacaactacatctccctcttccgcaaaaagacccgcaccgagaaggagaacaaggagctggagaacctggagatcaacctccgcaaggaaatcgccaaagcgttcaagggcaatgaagggtacaagagcctcttcaagaaagacatcatcgaaactatcctcccagagtttctcgatgacaaggacgagatcgcgctggtgaactcctttaacgggttcacaaccgcgtttaccggcttctttgataacagggaaaatatgttctccgaggaggccaagtccaccagcatcgccttcaggtgtatcaacgagaacctcacccgctacatttccaatatggacattttcgagaaggtggatgcgatcttcgataagcacgaggtgcaggagatcaaagagaagattctcaattccgattatgacgtcgaggatttcttcgaaggggagttctttaattttgtgctcacacaagagggcattgacgtgtacaacgcgattatcgggggcttcgtcacagagtccggggagaagattaaggggctgaatgagtacatcaatctgtacaatcagaagaccaagcagaaactgccgaaattcaagccgctctacaagcaagtcctgtccgatagggaaagcctctccttctacggcgagggctataccagcgacgaggaggtgctggaagtcttccgcaacacactgaataagaatagcgagattttctcctccatcaagaagctcgagaagctctttaagaactttgacgagtacagctccgccgggattttcgtgaagaacgggccggcgatcagcaccatctccaaggacatctttggcgagtggaacgtcatcagggacaagtggaacgccgagtacgacgacatccacctgaagaagaaggcggtggtgaccgagaagtatgaggacgatcgcaggaagtccttcaaaaaaatcggctccttcagcctcgaacagctccaggagtatgccgatgcggatctgtccgtcgtcgagaagctgaaggaaatcatcattcagaaggtcgacgagatctataaagtgtacgggtccagcgagaagctgttcgacgccgactttgtgctcgagaagtccctcaaaaagaatgacgccgtggtggccattatgaaagacctgctcgactccgtgaagtccttcgaaaattacattaaagcgttctttggggaggggaaggaaactaacagggatgagtccttctatggcgactttgtcctcgcgtacgacatcctgctgaaggtcgaccacatttacgacgcgatccgcaactacgtgacacagaagccgtactccaaagacaagttcaagctgtacttccagaacccgcaatttatggggggctgggacaaggataaagagacagactaccgcgcgacaattctccgctatggctccaaatactatctggccatcatggacaagaagtacgcgaagtgcctgcagaagatcgacaaagacgacgtcaatggcaactatgaaaagatcaactacaagctgctgccgggcccgaacaagatgctcccgaaggtgttcttcagcaagaagtggatggcctactacaatccaagcgaggatattcagaaaatctataaaaacgggaccttcaagaagggggacatgtttaacctcaacgactgccacaagctcattgatttcttcaaggatagcatttcccgctacccgaaatggtccaatgcgtacgattttaacttctccgagacagaaaagtacaaagacatcgcgggcttttacagggaggtggaggagcaagggtataaagtttcttttgaatccgcgagcaagaaggaagtcgacaagctcgtcgaggagggcaagctctacatgttccaaatttataacaaggacttttccgacaagagccatgggaccccaaacctccacaccatgtacttcaaactgctctttgacgagaacaaccacgggcaaatcaggctgagcggcggcgccgaattattcatgcgcagggcctccctcaagaaggaggagctggtcgtccatccagccaattccccgatcgcgaacaagaacccggacaatccgaaaaagaccaccaccctgtcctacgacgtctacaaggacaaacgcttcagcgaagaccagtacgaattacacatcccaattgcgattaataagtgcccaaagaatatcttcaaaattaatacagaggtcagggtgctgctcaaacacgacgacaatccgtatgtcatcggcattgccaggggcgagcgcaatctgctctatatcgtggtcgtggatgggaagggcaatattgtggagcagtactccctgaacgagattatcaacaacttcaatgggattaggattaagaccgactatcacagcctgctcgacaagaaagaaaaagagaggtttgaggcccgccaaaactggacctccattgagaatatcaaagaattaaaggccggctatatttcccaagtcgtccacaagatctgcgagctggtggagaaatatgacgccgtgattgcgctcgaagacttaaattctgggttcaagaactcccgcgtgaaggtggaaaaacaggtgtatcagaaattcgagaaaatgctgatcgacaaactcaattatatggtggataagaagtccaacccgtgtgccacagggggcgcgctgaagggctatcagatcaccaacaagttcgagagcttcaagagcatgagcacccagaacgggtttattttctacatcccggcgtggctcacctccaagattgacccgagcaccggcttcgtgaacctcctgaagacaaagtatacctccattgccgacagcaagaagtttatctcctccttcgaccgcattatgtatgtgccggaggaggacctcttcgagttcgccctcgactacaaaaacttcagccgcacagatgcggattacatcaagaagtggaagctgtactcctacgggaacaggatccgcatcttcaggaatccaaaaaaaaataacgtctttgactgggaggaagtgtgcctgacatccgcctacaaggaactgttcaataaatacggcatcaattaccagcagggcgacattcgcgccctcctctgtgagcagtccgacaaagcgttttactccagcttcatggccctcatgtccctgatgctccaaatgaggaatagcatcacagggcgcaccgacgtcgacttcctcatcagcccggtgaagaactccgacgggatcttttacgactcccgcaactatgaggcgcaagagaatgcgatcctcccgaagaacgccgatgcgaacggggcctataatatcgccaggaaagtgctctgggccatcgggcagttcaaaaaggcggaggatgagaagctcgacaaggtgaaaattgccatttccaacaaggagtggctggagtacgcgcagacctccgtgaagcacgaaagagataagtctaagtcttcttctaaggatcaacaacaacaagatgaacaacaatatccaccaccaccaccacaaaaggattcttcttctgaggttgaattttcacatgagtattggatgagacacgctcttaccttggctaagagagcaagggatgagagagaagttccagtgggagcagttcttgtgttgaacaatagagttattggagagggttggaacagggctattggacttcatgatcctactgctcacgcagaaattatggcacttagacaaggtggacttgttatgcagaactacaggcttatcgatgctactctttatgttacattcgagccatgtgtgatgtgcgctggagcaatgattcattctaggattggaagggttgtgttcggtgttagaaactctaagaggggagctgcaggttcacttatgaacgttttgaattatcctggtatgaaccacagagtggagattactgaaggtattttggcagatgaatgtgctgcacttttgtgcgatttttacagaatgcctagacaagtgttcaacgctcaaaagaaggcacaatcttctattaactctggcggctcaaaaagaaccgccgacggcagcgaattcgagcccaagaagaagaggaaagtcggaagcgga

SEQ ID NO: 273 - DNA, 4560 bp, synthetic construct
  source 1..4560: mol_type = other DNA
atgaaacggacagccgacggaagcgagttcgagtcaccaaagaagaagcggaaagtcagttccgccccgcctggaatgaggttgcgctctggcagatccacaggtgccccccttacgcgaggaagcggtagttccggcgggtcaagtgggggaggctccagtgggagtagcggaggtggaagtggtggctctggttctggtgggggcagtggggggtcctccaagcttgagaagtttacaaactgttacagcctctccaaaaccctcaggtttaaagcgatcccggtgggcaagacccaggagaacatcgacaacaagaggctcctggtggaagacgagaagcgcgccgaagactacaagggcgtgaagaagctgctcgataggtactacctcagctttattaacgacgtgctgcacagcatcaaactcaagaatctcaacaactacatctccctcttccgcaaaaagacccgcaccgagaaggagaacaaggagctggagaacctggagatcaacctccgcaaggaaatcgccaaagcgttcaagggcaatgaagggtacaagagcctcttcaagaaagacatcatcgaaactatcctcccagagtttctcgatgacaaggacgagatcgcgctggtgaactcctttaacgggttcacaaccgcgtttaccggcttctttgataacagggaaaatatgttctccgaggaggccaagtccaccagcatcgccttcaggtgtatcaacgagaacctcacccgctacatttccaatatggacattttcgagaaggtggatgcgatcttcgataagcacgaggtgcaggagatcaaagagaagattctcaattccgattatgacgtcgaggatttcttcgaaggggagttctttaattttgtgctcacacaagagggcattgacgtgtacaacgcgattatcgggggcttcgtcacagagtccggggagaagattaaggggctgaatgagtacatcaatctgtacaatcagaagaccaagcagaaactgccgaaattcaagccgctctacaagcaagtcctgtccgatagggaaagcctctccttctacggcgagggctataccagcgacgaggaggtgctggaagtcttccgcaacacactgaataagaatagcgagattttctcctccatcaagaagctcgagaagctctttaagaactttgacgagtacagctccgccgggattttcgtgaagaacgggccggcgatcagcaccatctccaaggacatctttggcgagtggaacgtcatcagggacaagtggaacgccgagtacgacgacatccacctgaagaagaaggcggtggtgaccgagaagtatgaggacgatcgcaggaagtccttcaaaaaaatcggctccttcagcctcgaacagctccaggagtatgccgatgcggatctgtccgtcgtcgagaagctgaaggaaatcatcattcagaaggtcgacgagatctataaagtgtacgggtccagcgagaagctgttcgacgccgactttgtgctcgagaagtccctcaaaaagaatgacgccgtggtggccattatgaaagacctgctcgactccgtgaagtccttcgaaaattacattaaagcgttctttggggaggggaaggaaactaacagggatgagtccttctatggcgactttgtcctcgcgtacgacatcctgctgaaggtcgaccacatttacgacgcgatccgcaactacgtgacacagaagccgtactccaaagacaagttcaagctgtacttccagaacccgcaatttatggggggctgggacaaggataaagagacagactaccgcgcgacaattctccgctatggctccaaatactatctggccatcatggacaagaagtacgcgaagtgcctgcagaagatcgacaaagacgacgtcaatggcaactatgaaaagatcaactacaagctgctgccgggcccgaacaagatgctcccgaaggtgttcttcagcaagaagtggatggcctactacaatccaagcgaggatattcagaaaatctataaaaacgggaccttcaagaagggggacatgtttaacctcaacgactgccacaagctcattgatttcttcaaggatagcatttcccgctacccgaaatggtccaatgcgtacgattttaacttctccgagacagaaaagtacaaagacatcgcgggcttttacagggaggtggaggagcaagggtataaagtttcttttgaatccgcgagcaagaaggaagtcgacaagctcgtcgaggagggcaagctctacatgttccaaatttataacaaggacttttccgacaagagccatgggaccccaaacctccacaccatgtacttcaaactgctctttgacgagaacaaccacgggcaaatcaggctgagcggcggcgccgaattattcatgcgcagggcctccctcaagaaggaggagctggtcgtccatccagccaattccccgatcgcgaacaagaacccggacaatccgaaaaagaccaccaccctgtcctacgacgtctacaaggacaaacgcttcagcgaagaccagtacgaattacacatcccaattgcgattaataagtgcccaaagaatatcttcaaaattaatacagaggtcagggtgctgctcaaacacgacgacaatccgtatgtcatcggcattgccaggggcgagcgcaatctgctctatatcgtggtcgtggatgggaagggcaatattgtggagcagtactccctgaacgagattatcaacaacttcaatgggattaggattaagaccgactatcacagcctgctcgacaagaaagaaaaagagaggtttgaggcccgccaaaactggacctccattgagaatatcaaagaattaaaggccggctatatttcccaagtcgtccacaagatctgcgagctggtggagaaatatgacgccgtgattgcgctcgaagacttaaattctgggttcaagaactcccgcgtgaaggtggaaaaacaggtgtatcagaaattcgagaaaatgctgatcgacaaactcaattatatggtggataagaagtccaacccgtgtgccacagggggcgcgctgaagggctatcagatcaccaacaagttcgagagcttcaagagcatgagcacccagaacgggtttattttctacatcccggcgtggctcacctccaagattgacccgagcaccggcttcgtgaacctcctgaagacaaagtatacctccattgccgacagcaagaagtttatctcctccttcgaccgcattatgtatgtgccggaggaggacctcttcgagttcgccctcgactacaaaaacttcagccgcacagatgcggattacatcaagaagtggaagctgtactcctacgggaacaggatccgcatcttcaggaatccaaaaaaaaataacgtctttgactgggaggaagtgtgcctgacatccgcctacaaggaactgttcaataaatacggcatcaattaccagcagggcgacattcgcgccctcctctgtgagcagtccgacaaagcgttttactccagcttcatggccctcatgtccctgatgctccaaatgaggaatagcatcacagggcgcaccgacgtcgacttcctcatcagcccggtgaagaactccgacgggatcttttacgactcccgcaactatgaggcgcaagagaatgcgatcctcccgaagaacgccgatgcgaacggggcctataatatcgccaggaaagtgctctgggccatcgggcagttcaaaaaggcggaggatgagaagctcgacaaggtgaaaattgccatttccaacaaggagtggctggagtacgcgcagacctccgtgaagcacgaaagagataagtctaagtcttcttctaaggatcaacaacaacaagatgaacaacaatatccaccaccaccaccacaaaaggattcttcttctgaggttgaattttcacatgagtattggatgagacacgctcttaccttggctaagagagcaagggatgagagagaagttccagtgggagcagttcttgtgttgaacaatagagttattggagagggttggaacagggctattggacttcatgatcctactgctcacgcagaaattatggcacttagacaaggtggacttgttatgcagaactacaggcttatcgatgctactctttatgttacattcgagccatgtgtgatgtgcgctggagcaatgattcattctaggattggaagggttgtgttcggtgttagaaactctaagaggggagctgcaggttcacttatgaacgttttgaattatcctggtatgaaccacagagtggagattactgaaggtattttggcagatgaatgtgctgcacttttgtgcgatttttacagaatgcctagacaagtgttcaacgctcaaaagaaggcacaatcttctattaactctggcggctcaaaaagaaccgccgacggcagcgaattcgagcccaagaagaagaggaaagtcggaagcgga

SEQ ID NO: 274 - DNA, 5215 bp, synthetic construct
  source 1..5215: mol_type = other DNA
atgaaacggacagccgacggaagcgagttcgagtcaccaaagaagaagcggaaagtcgaggcctcccccgcatcaggacctagacacctgatggatccccatattttcacatctaacttcaacaacggaatcggcagacacaagacctacctgtgctatgaggtggaaaggctggataacggaacctctgtgaagatggaccagcacaggtaagtatcaaggttacaagacaggtttaaggagaccaatagaaactgggcttgtcgagacagagaagactcttgcgtttctgataggcacctattggtcttactgacatccactttgcctttctctccacaggggcttcctgcataaccaggccaagaatctgctgtgcggtttctacgggagacatgcagaactgaggtttctggatctggtgccatccctgcagctggaccccgctcagatctacagagtgacttggttcatctcttggagcccttgcttttcatggggatgtgctggcgaggtgagggccttccttcaggaaaacacacacgtgagactgaggatttttgctgccagaatctacgattatgacccactgtacaaggaagctctgcagatgctgagggatgcaggcgctcaggtgagcattatgacctatgacgagttcaagcactgctgggatacttttgtggaccatcagggttgtccttttcagccatgggatgggctggacgagcattctcaggcactgagcggtagactgagggctatcctgcagaaccaggggaactctacttctcaatctgatggatcttctgttccagctgatattgatcaatcttctgattctgatcaatcttcttctcaaggacaaccaggatccaagctggagaagtttacaaactgttacagcctctccaaaaccctcaggtttaaagcgatcccggtgggcaagacccaggagaacatcgacaacaagaggctcctggtggaagacgagaagcgcgccgaagactacaagggcgtgaagaagctgctcgataggtactacctcagctttattaacgacgtgctgcacagcatcaaactcaagaatctcaacaactacatctccctcttccgcaaaaagacccgcaccgagaaggagaacaaggagctggagaacctggagatcaacctccgcaaggaaatcgccaaagcgttcaagggcaatgaagggtacaagagcctcttcaagaaagacatcatcgaaactatcctcccagagtttctcgatgacaaggacgagatcgcgctggtgaactcctttaacgggttcacaaccgcgtttaccggcttctttgataacagggaaaatatgttctccgaggaggccaagtccaccagcatcgccttcaggtgtatcaacgagaacctcacccgctacatttccaatatggacattttcgagaaggtggatgcgatcttcgataagcacgaggtgcaggagatcaaagagaagattctcaattccgattatgacgtcgaggatttcttcgaaggggagttctttaattttgtgctcacacaagagggcattgacgtgtacaacgcgattatcgggggcttcgtcacagagtccggggagaagattaaggggctgaatgagtacatcaatctgtacaatcagaagaccaagcagaaactgccgaaattcaagccgctctacaagcaagtcctgtccgatagggaaagcctctccttctacggcgagaaccagaccacccagaagggacagaagaacagccgcgagagaatgaagcggatcgaagagggcatcaaagagctgggcagccagatcctgaaagaacaccccgtggaaaacacccagctgcagaacgagaagctgtacctgtactacctgcagaatgggcgggatatgtacgtggaccaggaactggacatcaaccggctgtccgactacgatgtggaccatatcgtgcctcagagctttctgaaggacgactccatcgacaacaaggtgctgaccagaagcgacaagaaccggggcaagagcgacaacgtgccctccgaagaggtcgtgaagaagatgaagaactactggcggcagctgctgaacgccaagctgattacccagagaaagttcgacaatctgaccaaggccgagagaggcggcctgagcgagggctataccagcgacgaggaggtgctggaagtcttccgcaacacactgaataagaatagcgagattttctcctccatcaagaagctcgagaagctctttaagaactttgacgagtacagctccgccgggattttcgtgaagaacgggccggcgatcagcaccatctccaaggacatctttggcgagtggaacgtcatcagggacaagtggaacgccgagtacgacgacatccacctgaagaagaaggcggtggtgaccgagaagtatgaggacgatcgcaggaagtccttcaaaaaaatcggctccttcagcctcgaacagctccaggagtatgccgatgcggatctgtccgtcgtcgagaagctgaaggaaatcatcattcagaaggtcgacgagatctataaagtgtacgggtccagcgagaagctgttcgacgccgactttgtgctcgagaagtccctcaaaaagaatgacgccgtggtggccattatgaaagacctgctcgactccgtgaagtccttcgaaaattacattaaagcgttctttggggaggggaaggaaactaacagggatgagtccttctatggcgactttgtcctcgcgtacgacatcctgctgaaggtcgaccacatttacgacgcgatccgcaactacgtgacacagaagccgtactccaaagacaagttcaagctgtacttccagaacccgcaatttatggggggctgggacaaggataaagagacagactaccgcgcgacaattctccgctatggctccaaatactatctggccatcatggacaagaagtacgcgaagtgcctgcagaagatcgacaaagacgacgtcaatggcaactatgaaaagatcaactacaagctgctgccgggcccgaacaagatgctcccgaaggtgttcttcagcaagaagtggatggcctactacaatccaagcgaggatattcagaaaatctataaaaacgggaccttcaagaagggggacatgtttaacctcaacgactgccacaagctcattgatttcttcaaggatagcatttcccgctacccgaaatggtccaatgcgtacgattttaacttctccgagacagaaaagtacaaagacatcgcgggcttttacagggaggtggaggagcaagggtataaagtttcttttgaatccgcgagcaagaaggaagtcgacaagctcgtcgaggagggcaagctctacatgttccaaatttataacaaggacttttccgacaagagccatgggaccccaaacctccacaccatgtacttcaaactgctctttgacgagaacaaccacgggcaaatcaggctgagcggcggcgccgaattattcatgcgcagggcctccctcaagaaggaagagctggtcgtccatccagccaattccccgatcgcgaacaagaacccggacaatccgaaaaagaccaccaccctgtcctacgacgtctacaaggacaaacgcttcagcgaagaccagtacgaattacacatcccaattgcgattaataagtgcccaaagaatatcttcaaaattaatacagaggtcagggtgctgctcaaacacgacgacaatccgtatgtcatcggcattgccaggggcgagcgcaatctgctctatatcgtggtcgtggatgggaagggcaatattgtggagcagtactccctgaacgagattatcaacaacttcaatgggattaggattaagaccgactatcacagcctgctcgacaagaaagaaaaagagaggtttgaggcccgccaaaactggacctccattgagaatatcaaagaattaaaggccggctatatttcccaagtcgtccacaagatctgcgagctggtggagaaatatgacgccgtgattgcgctcgaagacttaaattctgggttcaagaactcccgcgtgaaggtggaaaaacaggtgtatcagaaattcgagaaaatgctgatcgacaaactcaattatatggtggataagaagtccaacccgtgtgccacagggggcgcgctgaagggctatcagatcaccaacaagttcgagagcttcaagagcatgagcacccagaacgggtttattttctacatcccggcgtggctcacctccaagattgacccgagcaccggcttcgtgaacctcctgaagacaaagtatacctccattgccgacagcaagaagtttatctcctccttcgaccgcattatgtatgtgccggaggaggacctcttcgagttcgccctcgactacaaaaacttcagccgcacagatgcggattacatcaagaagtggaagctgtactcctacgggaacaggatccgcatcttcaggaatccaaaaaaaaataacgtctttgactgggaggaagtgtgcctgacatccgcctacaaggaactgttcaataaatacggcatcaattaccagcagggcgacattcgcgccctcctctgtgagcagtccgacaaagcgttttactccagcttcatggccctcatgtccctgatgctccaaatgaggaatagcatcacagggcgcaccgacgtcgacttcctcatcagcccggtgaagaactccgacgggatcttttacgactcccgcaactatgaggcgcaagagaatgcgatcctcccgaagaacgccgatgcgaacggggcctataatatcgccaggaaagtgctctgggccatcgggcagttcaaaaaggcggaggatgagaagctcgacaaggtgaaaattgccatttccaacaaggagtggctggagtacgcgcagacctccgtgaagcactctggcggctcaaaaagaaccgccgacggcagcgaattcgagggtagttccggcgggtcaagtgggggaggctccagtgggagtagcggaggtggaagtggtggctctggttctggtgggggcagtggggggtccgccccgcctggaatgaggttgcgctctggcagatccacaggtgccccccttacgcgaggaagccccaagaagaagaggaaagtcggaagcgga

SEQ ID NO: 275 - DNA, 5260 bp, synthetic construct
  source 1..5260: mol_type = other DNA
atgaaacggacagccgacggaagcgagttcgagtcaccaaagaagaagcggaaagtcgaggcctcccccgcatcaggacctagacacctgatggatccccatattttcacatctaacttcaacaacggaatcggcagacacaagacctacctgtgctatgaggtggaaaggctggataacggaacctctgtgaagatggaccagcacaggtaagtatcaaggttacaagacaggtttaaggagaccaatagaaactgggcttgtcgagacagagaagactcttgcgtttctgataggcacctattggtcttactgacatccactttgcctttctctccacaggggcttcctgcataaccaggccaagaatctgctgtgcggtttctacgggagacatgcagaactgaggtttctggatctggtgccatccctgcagctggaccccgctcagatctacagagtgacttggttcatctcttggagcccttgcttttcatggggatgtgctggcgaggtgagggccttccttcaggaaaacacacacgtgagactgaggatttttgctgccagaatctacgattatgacccactgtacaaggaagctctgcagatgctgagggatgcaggcgctcaggtgagcattatgacctatgacgagttcaagcactgctgggatacttttgtggaccatcagggttgtccttttcagccatgggatgggctggacgagcattctcaggcactgagcggtagactgagggctatcctgcagaaccaggggaactctacttctcaatctgatggatcttctgttccagctgatattgatcaatcttctgattctgatcaatcttcttctcaaggacaaccaggatccaagctggagaagtttacaaactgttacagcctctccaaaaccctcaggtttaaagcgatcccggtgggcaagacccaggagaacatcgacaacaagaggctcctggtggaagacgagaagcgcgccgaagactacaagggcgtgaagaagctgctcgataggtactacctcagctttattaacgacgtgctgcacagcatcaaactcaagaatctcaacaactacatctccctcttccgcaaaaagacccgcaccgagaaggagaacaaggagctggagaacctggagatcaacctccgcaaggaaatcgccaaagcgttcaagggcaatgaagggtacaagagcctcttcaagaaagacatcatcgaaactatcctcccagagtttctcgatgacaaggacgagatcgcgctggtgaactcctttaacgggttcacaaccgcgtttaccggcttctttgataacagggaaaatatgttctccgaggaggccaagtccaccagcatcgccttcaggtgtatcaacgagaacctcacccgctacatttccaatatggacattttcgagaaggtggatgcgatcttcgataagcacgaggtgcaggagatcaaagagaagattctcaattccgattatgacgtcgaggatttcttcgaaggggagttctttaattttgtgctcacacaagagggcattgacgtgtacaacgcgattatcgggggcttcgtcacagagtccggggagaagattaaggggctgaatgagtacatcaatctgtacaatcagaagaccaagcagaaactgccgaaattcaagccgctctacaagcaagtcctgtccgatagggaaagcctctccttctacggcgagaaccagaccacccagaagggacagaagaacagccgcgagagaatgaagcggatcgaagagggcatcaaagagctgggcagccagatcctgaaagaacaccccgtggaaaacacccagctgcagaacgagaagctgtacctgtactacctgcagaatgggcgggatatgtacgtggaccaggaactggacatcaaccggctgtccgactacgatgtggaccatatcgtgcctcagagctttctgaaggacgactccatcgacaacaaggtgctgaccagaagcgacaagaaccggggcaagagcgacaacgtgccctccgaagaggtcgtgaagaagatgaagaactactggcggcagctgctgaacgccaagctgattacccagagaaagttcgacaatctgaccaaggccgagagaggcggcctgagcgagggctataccagcgacgaggaggtgctggaagtcttccgcaacacactgaataagaatagcgagattttctcctccatcaagaagctcgagaagctctttaagaactttgacgagtacagctccgccgggattttcgtgaagaacgggccggcgatcagcaccatctccaaggacatctttggcgagtggaacgtcatcagggacaagtggaacgccgagtacgacgacatccacctgaagaagaaggcggtggtgaccgagaagtatgaggacgatcgcaggaagtccttcaaaaaaatcggctccttcagcctcgaacagctccaggagtatgccgatgcggatctgtccgtcgtcgagaagctgaaggaaatcatcattcagaaggtcgacgagatctataaagtgtacgggtccagcgagaagctgttcgacgccgactttgtgctcgagaagtccctcaaaaagaatgacgccgtggtggccattatgaaagacctgctcgactccgtgaagtccttcgaaaattacattaaagcgttctttggggaggggaaggaaactaacagggatgagtccttctatggcgactttgtcctcgcgtacgacatcctgctgaaggtcgaccacatttacgacgcgatccgcaactacgtgacacagaagccgtactccaaagacaagttcaagctgtacttccagaacccgcaatttatggggggctgggacaaggataaagagacagactaccgcgcgacaattctccgctatggctccaaatactatctggccatcatggacaagaagtacgcgaagtgcctgcagaagatcgacaaagacgacgtcaatggcaactatgaaaagatcaactacaagctgctgccgggcccgaacaagatgctcccgaaggtgttcttcagcaagaagtggatggcctactacaatccaagcgaggatattcagaaaatctataaaaacgggaccttcaagaagggggacatgtttaacctcaacgactgccacaagctcattgatttcttcaaggatagcatttcccgctacccgaaatggtccaatgcgtacgattttaacttctccgagacagaaaagtacaaagacatcgcgggcttttacagggaggtggaggagcaagggtataaagtttcttttgaatccgcgagcaagaaggaagtcgacaagctcgtcgaggagggcaagctctacatgttccaaatttataacaaggacttttccgacaagagccatgggaccccaaacctccacaccatgtacttcaaactgctctttgacgagaacaaccacgggcaaatcaggctgagcggcggcgccgaattattcatgcgcagggcctccctcaagaaggaagagctggtcgtccatccagccaattccccgatcgcgaacaagaacccggacaatccgaaaaagaccaccaccctgtcctacgacgtctacaaggacaaacgcttcagcgaagaccagtacgaattacacatcccaattgcgattaataagtgcccaaagaatatcttcaaaattaatacagaggtcagggtgctgctcaaacacgacgacaatccgtatgtcatcggcattgccaggggcgagcgcaatctgctctatatcgtggtcgtggatgggaagggcaatattgtggagcagtactccctgaacgagattatcaacaacttcaatgggattaggattaagaccgactatcacagcctgctcgacaagaaagaaaaagagaggtttgaggcccgccaaaactggacctccattgagaatatcaaagaattaaaggccggctatatttcccaagtcgtccacaagatctgcgagctggtggagaaatatgacgccgtgattgcgctcgaagacttaaattctgggttcaagaactcccgcgtgaaggtggaaaaacaggtgtatcagaaattcgagaaaatgctgatcgacaaactcaattatatggtggataagaagtccaacccgtgtgccacagggggcgcgctgaagggctatcagatcaccaacaagttcgagagcttcaagagcatgagcacccagaacgggtttattttctacatcccggcgtggctcacctccaagattgacccgagcaccggcttcgtgaacctcctgaagacaaagtatacctccattgccgacagcaagaagtttatctcctccttcgaccgcattatgtatgtgccggaggaggacctcttcgagttcgccctcgactacaaaaacttcagccgcacagatgcggattacatcaagaagtggaagctgtactcctacgggaacaggatccgcatcttcaggaatccaaaaaaaaataacgtctttgactgggaggaagtgtgcctgacatccgcctacaaggaactgttcaataaatacggcatcaattaccagcagggcgacattcgcgccctcctctgtgagcagtccgacaaagcgttttactccagcttcatggccctcatgtccctgatgctccaaatgaggaatagcatcacagggcgcaccgacgtcgacttcctcatcagcccggtgaagaactccgacgggatcttttacgactcccgcaactatgaggcgcaagagaatgcgatcctcccgaagaacgccgatgcgaacggggcctataatatcgccaggaaagtgctctgggccatcgggcagttcaaaaaggcggaggatgagaagctcgacaaggtgaaaattgccatttccaacaaggagtggctggagtacgcgcagacctccgtgaagcactctggcggctcaaaaagaaccgccgacggcagcgaattcgagggtagttccggcgggtcaagtgggggaggctccagtgggagtagcggaggtggaagtggtggctctggttctggtgggggcagtggggggtccgaacccgaagaggagagaatacggtactcacaaagactccgcgggacaatgcgcaggagatacgaggatgacgggatatccgacgatgagatcgagggcaagggaagtcccaagaagaagaggaaagtcggaagcgga

SEQ ID NO: 276 - DNA, 4935 bp, synthetic construct
  source 1..4935: mol_type = other DNA
atgaaacggacagccgacggaagcgagttcgagtcaccaaagaagaagcggaaagtcagccaccaggactggatgaggatggcgctggagcaggcaaagatcgcttatgatctcggagaagttccaattggagctgtggtcatccaggataacaaggtgatagccctggcgcacaatgagaaggaacaaagacaagatcccaccgcccacgccgaggtgctggccgtccagcgcgccactgaaaaactgggcacatggcgactttctgacgccaccctctacgtcaccttagaaccttgtccaatgtgcgccggcgcgctggtgcagtccagactgaggacgctggtgtttggggtgagcaatctcaagcgcggcgccgtggggagcgtcatgaacgtgctggacttctcaagatggaaccatagagtggaggtcgtggccggcatcttggaggaggactgctccgcaatcctgaagaacttctacaggcagccgcggtctggaggatctagcggaggatcctctggcagcgagacaccaggaacaagcgagtcagcaacaccagagagcagtggcggcagcagcggcggcagctccaagctggagaagtttacaaactgttacagcctctccaaaaccctcaggtttaaagcgatcccggtgggcaagacccaggagaacatcgacaacaagaggctcctggtggaagacgagaagcgcgccgaagactacaagggcgtgaagaagctgctcgataggtactacctcagctttattaacgacgtgctgcacagcatcaaactcaagaatctcaacaactacatctccctcttccgcaaaaagacccgcaccgagaaggagaacaaggagctggagaacctggagatcaacctccgcaaggaaatcgccaaagcgttcaagggcaatgaagggtacaagagcctcttcaagaaagacatcatcgaaactatcctcccagagtttctcgatgacaaggacgagatcgcgctggtgaactcctttaacgggttcacaaccgcgtttaccggcttctttgataacagggaaaatatgttctccgaggaggccaagtccaccagcatcgccttcaggtgtatcaacgagaacctcacccgctacatttccaatatggacattttcgagaaggtggatgcgatcttcgataagcacgaggtgcaggagatcaaagagaagattctcaattccgattatgacgtcgaggatttcttcgaaggggagttctttaattttgtgctcacacaagagggcattgacgtgtacaacgcgattatcgggggcttcgtcacagagtccggggagaagattaaggggctgaatgagtacatcaatctgtacaatcagaagaccaagcagaaactgccgaaattcaagccgctctacaagcaagtcctgtccgatagggaaagcctctccttctacggcgagaaccagaccacccagaagggacagaagaacagccgcgagagaatgaagcggatcgaagagggcatcaaagagctgggcagccagatcctgaaagaacaccccgtggaaaacacccagctgcagaacgagaagctgtacctgtactacctgcagaatgggcgggatatgtacgtggaccaggaactggacatcaaccggctgtccgactacgatgtggaccatatcgtgcctcagagctttctgaaggacgactccatcgacaacaaggtgctgaccagaagcgacaagaaccggggcaagagcgacaacgtgccctccgaagaggtcgtgaagaagatgaagaactactggcggcagctgctgaacgccaagctgattacccagagaaagttcgacaatctgaccaaggccgagagaggcggcctgagcgagggctataccagcgacgaggaggtgctggaagtcttccgcaacacactgaataagaatagcgagattttctcctccatcaagaagctcgagaagctctttaagaactttgacgagtacagctccgccgggattttcgtgaagaacgggccggcgatcagcaccatctccaaggacatctttggcgagtggaacgtcatcagggacaagtggaacgccgagtacgacgacatccacctgaagaagaaggcggtggtgaccgagaagtatgaggacgatcgcaggaagtccttcaaaaaaatcggctccttcagcctcgaacagctccaggagtatgccgatgcggatctgtccgtcgtcgagaagctgaaggaaatcatcattcagaaggtcgacgagatctataaagtgtacgggtccagcgagaagctgttcgacgccgactttgtgctcgagaagtccctcaaaaagaatgacgccgtggtggccattatgaaagacctgctcgactccgtgaagtccttcgaaaattacattaaagcgttctttggggaggggaaggaaactaacagggatgagtccttctatggcgactttgtcctcgcgtacgacatcctgctgaaggtcgaccacatttacgacgcgatccgcaactacgtgacacagaagccgtactccaaagacaagttcaagctgtacttccagaacccgcaatttatggggggctgggacaaggataaagagacagactaccgcgcgacaattctccgctatggctccaaatactatctggccatcatggacaagaagtacgcgaagtgcctgcagaagatcgacaaagacgacgtcaatggcaactatgaaaagatcaactacaagctgctgccgggcccgaacaagatgctcccgaaggtgttcttcagcaagaagtggatggcctactacaatccaagcgaggatattcagaaaatctataaaaacgggaccttcaagaagggggacatgtttaacctcaacgactgccacaagctcattgatttcttcaaggatagcatttcccgctacccgaaatggtccaatgcgtacgattttaacttctccgagacagaaaagtacaaagacatcgcgggcttttacagggaggtggaggagcaagggtataaagtttcttttgaatccgcgagcaagaaggaagtcgacaagctcgtcgaggagggcaagctctacatgttccaaatttataacaaggacttttccgacaagagccatgggaccccaaacctccacaccatgtacttcaaactgctctttgacgagaacaaccacgggcaaatcaggctgagcggcggcgccgaattattcatgcgcagggcctccctcaagaaggaagagctggtcgtccatccagccaattccccgatcgcgaacaagaacccggacaatccgaaaaagaccaccaccctgtcctacgacgtctacaaggacaaacgcttcagcgaagaccagtacgaattacacatcccaattgcgattaataagtgcccaaagaatatcttcaaaattaatacagaggtcagggtgctgctcaaacacgacgacaatccgtatgtcatcggcattgccaggggcgagcgcaatctgctctatatcgtggtcgtggatgggaagggcaatattgtggagcagtactccctgaacgagattatcaacaacttcaatgggattaggattaagaccgactatcacagcctgctcgacaagaaagaaaaagagaggtttgaggcccgccaaaactggacctccattgagaatatcaaagaattaaaggccggctatatttcccaagtcgtccacaagatctgcgagctggtggagaaatatgacgccgtgattgcgctcgaagacttaaattctgggttcaagaactcccgcgtgaaggtggaaaaacaggtgtatcagaaattcgagaaaatgctgatcgacaaactcaattatatggtggataagaagtccaacccgtgtgccacagggggcgcgctgaagggctatcagatcaccaacaagttcgagagcttcaagagcatgagcacccagaacgggtttattttctacatcccggcgtggctcacctccaagattgacccgagcaccggcttcgtgaacctcctgaagacaaagtatacctccattgccgacagcaagaagtttatctcctccttcgaccgcattatgtatgtgccggaggaggacctcttcgagttcgccctcgactacaaaaacttcagccgcacagatgcggattacatcaagaagtggaagctgtactcctacgggaacaggatccgcatcttcaggaatccaaaaaaaaataacgtctttgactgggaggaagtgtgcctgacatccgcctacaaggaactgttcaataaatacggcatcaattaccagcagggcgacattcgcgccctcctctgtgagcagtccgacaaagcgttttactccagcttcatggccctcatgtccctgatgctccaaatgaggaatagcatcacagggcgcaccgacgtcgacttcctcatcagcccggtgaagaactccgacgggatcttttacgactcccgcaactatgaggcgcaagagaatgcgatcctcccgaagaacgccgatgcgaacggggcctataatatcgccaggaaagtgctctgggccatcgggcagttcaaaaaggcggaggatgagaagctcgacaaggtgaaaattgccatttccaacaaggagtggctggagtacgcgcagacctccgtgaagcactctggcggctcaaaaagaaccgccgacggcagcgaattcgagggtagttccggcgggtcaagtgggggaggctccagtgggagtagcggaggtggaagtggtggctctggttctggtgggggcagtggggggtccgccccgcctggaatgaggttgcgctctggcagatccacaggtgccccccttacgcgaggaagccccaagaagaagaggaaagtcggaagcgga

SEQ ID NO: 277 - DNA, 4980 bp, synthetic construct
  source 1..4980: mol_type = other DNA
atgaaacggacagccgacggaagcgagttcgagtcaccaaagaagaagcggaaagtcagccaccaggactggatgaggatggcgctggagcaggcaaagatcgcttatgatctcggagaagttccaattggagctgtggtcatccaggataacaaggtgatagccctggcgcacaatgagaaggaacaaagacaagatcccaccgcccacgccgaggtgctggccgtccagcgcgccactgaaaaactgggcacatggcgactttctgacgccaccctctacgtcaccttagaaccttgtccaatgtgcgccggcgcgctggtgcagtccagactgaggacgctggtgtttggggtgagcaatctcaagcgcggcgccgtggggagcgtcatgaacgtgctggacttctcaagatggaaccatagagtggaggtcgtggccggcatcttggaggaggactgctccgcaatcctgaagaacttctacaggcagccgcggtctggaggatctagcggaggatcctctggcagcgagacaccaggaacaagcgagtcagcaacaccagagagcagtggcggcagcagcggcggcagctccaagctggagaagtttacaaactgttacagcctctccaaaaccctcaggtttaaagcgatcccggtgggcaagacccaggagaacatcgacaacaagaggctcctggtggaagacgagaagcgcgccgaagactacaagggcgtgaagaagctgctcgataggtactacctcagctttattaacgacgtgctgcacagcatcaaactcaagaatctcaacaactacatctccctcttccgcaaaaagacccgcaccgagaaggagaacaaggagctggagaacctggagatcaacctccgcaaggaaatcgccaaagcgttcaagggcaatgaagggtacaagagcctcttcaagaaagacatcatcgaaactatcctcccagagtttctcgatgacaaggacgagatcgcgctggtgaactcctttaacgggttcacaaccgcgtttaccggcttctttgataacagggaaaatatgttctccgaggaggccaagtccaccagcatcgccttcaggtgtatcaacgagaacctcacccgctacatttccaatatggacattttcgagaaggtggatgcgatcttcgataagcacgaggtgcaggagatcaaagagaagattctcaattccgattatgacgtcgaggatttcttcgaaggggagttctttaattttgtgctcacacaagagggcattgacgtgtacaacgcgattatcgggggcttcgtcacagagtccggggagaagattaaggggctgaatgagtacatcaatctgtacaatcagaagaccaagcagaaactgccgaaattcaagccgctctacaagcaagtcctgtccgatagggaaagcctctccttctacggcgagaaccagaccacccagaagggacagaagaacagccgcgagagaatgaagcggatcgaagagggcatcaaagagctgggcagccagatcctgaaagaacaccccgtggaaaacacccagctgcagaacgagaagctgtacctgtactacctgcagaatgggcgggatatgtacgtggaccaggaactggacatcaaccggctgtccgactacgatgtggaccatatcgtgcctcagagctttctgaaggacgactccatcgacaacaaggtgctgaccagaagcgacaagaaccggggcaagagcgacaacgtgccctccgaagaggtcgtgaagaagatgaagaactactggcggcagctgctgaacgccaagctgattacccagagaaagttcgacaatctgaccaaggccgagagaggcggcctgagcgagggctataccagcgacgaggaggtgctggaagtcttccgcaacacactgaataagaatagcgagattttctcctccatcaagaagctcgagaagctctttaagaactttgacgagtacagctccgccgggattttcgtgaagaacgggccggcgatcagcaccatctccaaggacatctttggcgagtggaacgtcatcagggacaagtggaacgccgagtacgacgacatccacctgaagaagaaggcggtggtgaccgagaagtatgaggacgatcgcaggaagtccttcaaaaaaatcggctccttcagcctcgaacagctccaggagtatgccgatgcggatctgtccgtcgtcgagaagctgaaggaaatcatcattcagaaggtcgacgagatctataaagtgtacgggtccagcgagaagctgttcgacgccgactttgtgctcgagaagtccctcaaaaagaatgacgccgtggtggccattatgaaagacctgctcgactccgtgaagtccttcgaaaattacattaaagcgttctttggggaggggaaggaaactaacagggatgagtccttctatggcgactttgtcctcgcgtacgacatcctgctgaaggtcgaccacatttacgacgcgatccgcaactacgtgacacagaagccgtactccaaagacaagttcaagctgtacttccagaacccgcaatttatggggggctgggacaaggataaagagacagactaccgcgcgacaattctccgctatggctccaaatactatctggccatcatggacaagaagtacgcgaagtgcctgcagaagatcgacaaagacgacgtcaatggcaactatgaaaagatcaactacaagctgctgccgggcccgaacaagatgctcccgaaggtgttcttcagcaagaagtggatggcctactacaatccaagcgaggatattcagaaaatctataaaaacgggaccttcaagaagggggacatgtttaacctcaacgactgccacaagctcattgatttcttcaaggatagcatttcccgctacccgaaatggtccaatgcgtacgattttaacttctccgagacagaaaagtacaaagacatcgcgggcttttacagggaggtggaggagcaagggtataaagtttcttttgaatccgcgagcaagaaggaagtcgacaagctcgtcgaggagggcaagctctacatgttccaaatttataacaaggacttttccgacaagagccatgggaccccaaacctccacaccatgtacttcaaactgctctttgacgagaacaaccacgggcaaatcaggctgagcggcggcgccgaattattcatgcgcagggcctccctcaagaaggaagagctggtcgtccatccagccaattccccgatcgcgaacaagaacccggacaatccgaaaaagaccaccaccctgtcctacgacgtctacaaggacaaacgcttcagcgaagaccagtacgaattacacatcccaattgcgattaataagtgcccaaagaatatcttcaaaattaatacagaggtcagggtgctgctcaaacacgacgacaatccgtatgtcatcggcattgccaggggcgagcgcaatctgctctatatcgtggtcgtggatgggaagggcaatattgtggagcagtactccctgaacgagattatcaacaacttcaatgggattaggattaagaccgactatcacagcctgctcgacaagaaagaaaaagagaggtttgaggcccgccaaaactggacctccattgagaatatcaaagaattaaaggccggctatatttcccaagtcgtccacaagatctgcgagctggtggagaaatatgacgccgtgattgcgctcgaagacttaaattctgggttcaagaactcccgcgtgaaggtggaaaaacaggtgtatcagaaattcgagaaaatgctgatcgacaaactcaattatatggtggataagaagtccaacccgtgtgccacagggggcgcgctgaagggctatcagatcaccaacaagttcgagagcttcaagagcatgagcacccagaacgggtttattttctacatcccggcgtggctcacctccaagattgacccgagcaccggcttcgtgaacctcctgaagacaaagtatacctccattgccgacagcaagaagtttatctcctccttcgaccgcattatgtatgtgccggaggaggacctcttcgagttcgccctcgactacaaaaacttcagccgcacagatgcggattacatcaagaagtggaagctgtactcctacgggaacaggatccgcatcttcaggaatccaaaaaaaaataacgtctttgactgggaggaagtgtgcctgacatccgcctacaaggaactgttcaataaatacggcatcaattaccagcagggcgacattcgcgccctcctctgtgagcagtccgacaaagcgttttactccagcttcatggccctcatgtccctgatgctccaaatgaggaatagcatcacagggcgcaccgacgtcgacttcctcatcagcccggtgaagaactccgacgggatcttttacgactcccgcaactatgaggcgcaagagaatgcgatcctcccgaagaacgccgatgcgaacggggcctataatatcgccaggaaagtgctctgggccatcgggcagttcaaaaaggcggaggatgagaagctcgacaaggtgaaaattgccatttccaacaaggagtggctggagtacgcgcagacctccgtgaagcactctggcggctcaaaaagaaccgccgacggcagcgaattcgagggtagttccggcgggtcaagtgggggaggctccagtgggagtagcggaggtggaagtggtggctctggttctggtgggggcagtggggggtccgaacccgaagaggagagaatacggtactcacaaagactccgcgggacaatgcgcaggagatacgaggatgacgggatatccgacgatgagatcgagggcaagggaagtcccaagaagaagaggaaagtcggaagcgga

SEQ ID NO: 278 - DNA, 4992 bp, synthetic construct
  source 1..4992: mol_type = other DNA
atgaaacggacagccgacggaagcgagttcgagtcaccaaagaagaagcggaaagtctctgaggttgaattttcacatgagtattggatgagacacgctcttaccttggctaagagagcaagggatgagagagaagttccagtgggagcagttcttgtgttgaacaatagagttattggagagggttggaacagggctattggacttcatgatcctactgctcacgcagaaattatggcacttagacaaggtggacttgttatgcagaactacaggcttatcgatgctactctttatgttacattcgagccatgtgtgatgtgcgctggagcaatgattcattctaggattggaagggttgtgttcggtgttagaaactctaagaggggagctgcaggttcacttatgaacgttttgaattatcctggtatgaaccacagagtggagattactgaaggtattttggcagatgaatgtgctgcacttttgtgcgatttttacagaatgcctagacaagtgttcaacgctcaaaagaaggcacaatcttctattaactctggaggatctagcggaggatcctctggcagcgagacaccaggaacaagcgagtcagcaacaccagagagcagtggcggcagcagcggcggcagctccaagctggagaagtttacaaactgttacagcctctccaaaaccctcaggtttaaagcgatcccggtgggcaagacccaggagaacatcgacaacaagaggctcctggtggaagacgagaagcgcgccgaagactacaagggcgtgaagaagctgctcgataggtactacctcagctttattaacgacgtgctgcacagcatcaaactcaagaatctcaacaactacatctccctcttccgcaaaaagacccgcaccgagaaggagaacaaggagctggagaacctggagatcaacctccgcaaggaaatcgccaaagcgttcaagggcaatgaagggtacaagagcctcttcaagaaagacatcatcgaaactatcctcccagagtttctcgatgacaaggacgagatcgcgctggtgaactcctttaacgggttcacaaccgcgtttaccggcttctttgataacagggaaaatatgttctccgaggaggccaagtccaccagcatcgccttcaggtgtatcaacgagaacctcacccgctacatttccaatatggacattttcgagaaggtggatgcgatcttcgataagcacgaggtgcaggagatcaaagagaagattctcaattccgattatgacgtcgaggatttcttcgaaggggagttctttaattttgtgctcacacaagagggcattgacgtgtacaacgcgattatcgggggcttcgtcacagagtccggggagaagattaaggggctgaatgagtacatcaatctgtacaatcagaagaccaagcagaaactgccgaaattcaagccgctctacaagcaagtcctgtccgatagggaaagcctctccttctacggcgagaaccagaccacccagaagggacagaagaacagccgcgagagaatgaagcggatcgaagagggcatcaaagagctgggcagccagatcctgaaagaacaccccgtggaaaacacccagctgcagaacgagaagctgtacctgtactacctgcagaatgggcgggatatgtacgtggaccaggaactggacatcaaccggctgtccgactacgatgtggaccatatcgtgcctcagagctttctgaaggacgactccatcgacaacaaggtgctgaccagaagcgacaagaaccggggcaagagcgacaacgtgccctccgaagaggtcgtgaagaagatgaagaactactggcggcagctgctgaacgccaagctgattacccagagaaagttcgacaatctgaccaaggccgagagaggcggcctgagcgagggctataccagcgacgaggaggtgctggaagtcttccgcaacacactgaataagaatagcgagattttctcctccatcaagaagctcgagaagctctttaagaactttgacgagtacagctccgccgggattttcgtgaagaacgggccggcgatcagcaccatctccaaggacatctttggcgagtggaacgtcatcagggacaagtggaacgccgagtacgacgacatccacctgaagaagaaggcggtggtgaccgagaagtatgaggacgatcgcaggaagtccttcaaaaaaatcggctccttcagcctcgaacagctccaggagtatgccgatgcggatctgtccgtcgtcgagaagctgaaggaaatcatcattcagaaggtcgacgagatctataaagtgtacgggtccagcgagaagctgttcgacgccgactttgtgctcgagaagtccctcaaaaagaatgacgccgtggtggccattatgaaagacctgctcgactccgtgaagtccttcgaaaattacattaaagcgttctttggggaggggaaggaaactaacagggatgagtccttctatggcgactttgtcctcgcgtacgacatcctgctgaaggtcgaccacatttacgacgcgatccgcaactacgtgacacagaagccgtactccaaagacaagttcaagctgtacttccagaacccgcaatttatggggggctgggacaaggataaagagacagactaccgcgcgacaattctccgctatggctccaaatactatctggccatcatggacaagaagtacgcgaagtgcctgcagaagatcgacaaagacgacgtcaatggcaactatgaaaagatcaactacaagctgctgccgggcccgaacaagatgctcccgaaggtgttcttcagcaagaagtggatggcctactacaatccaagcgaggatattcagaaaatctataaaaacgggaccttcaagaagggggacatgtttaacctcaacgactgccacaagctcattgatttcttcaaggatagcatttcccgctacccgaaatggtccaatgcgtacgattttaacttctccgagacagaaaagtacaaagacatcgcgggcttttacagggaggtggaggagcaagggtataaagtttcttttgaatccgcgagcaagaaggaagtcgacaagctcgtcgaggagggcaagctctacatgttccaaatttataacaaggacttttccgacaagagccatgggaccccaaacctccacaccatgtacttcaaactgctctttgacgagaacaaccacgggcaaatcaggctgagcggcggcgccgaattattcatgcgcagggcctccctcaagaaggaagagctggtcgtccatccagccaattccccgatcgcgaacaagaacccggacaatccgaaaaagaccaccaccctgtcctacgacgtctacaaggacaaacgcttcagcgaagaccagtacgaattacacatcccaattgcgattaataagtgcccaaagaatatcttcaaaattaatacagaggtcagggtgctgctcaaacacgacgacaatccgtatgtcatcggcattgccaggggcgagcgcaatctgctctatatcgtggtcgtggatgggaagggcaatattgtggagcagtactccctgaacgagattatcaacaacttcaatgggattaggattaagaccgactatcacagcctgctcgacaagaaagaaaaagagaggtttgaggcccgccaaaactggacctccattgagaatatcaaagaattaaaggccggctatatttcccaagtcgtccacaagatctgcgagctggtggagaaatatgacgccgtgattgcgctcgaagacttaaattctgggttcaagaactcccgcgtgaaggtggaaaaacaggtgtatcagaaattcgagaaaatgctgatcgacaaactcaattatatggtggataagaagtccaacccgtgtgccacagggggcgcgctgaagggctatcagatcaccaacaagttcgagagcttcaagagcatgagcacccagaacgggtttattttctacatcccggcgtggctcacctccaagattgacccgagcaccggcttcgtgaacctcctgaagacaaagtatacctccattgccgacagcaagaagtttatctcctccttcgaccgcattatgtatgtgccggaggaggacctcttcgagttcgccctcgactacaaaaacttcagccgcacagatgcggattacatcaagaagtggaagctgtactcctacgggaacaggatccgcatcttcaggaatccaaaaaaaaataacgtctttgactgggaggaagtgtgcctgacatccgcctacaaggaactgttcaataaatacggcatcaattaccagcagggcgacattcgcgccctcctctgtgagcagtccgacaaagcgttttactccagcttcatggccctcatgtccctgatgctccaaatgaggaatagcatcacagggcgcaccgacgtcgacttcctcatcagcccggtgaagaactccgacgggatcttttacgactcccgcaactatgaggcgcaagagaatgcgatcctcccgaagaacgccgatgcgaacggggcctataatatcgccaggaaagtgctctgggccatcgggcagttcaaaaaggcggaggatgagaagctcgacaaggtgaaaattgccatttccaacaaggagtggctggagtacgcgcagacctccgtgaagcactctggcggctcaaaaagaaccgccgacggcagcgaattcgagggtagttccggcgggtcaagtgggggaggctccagtgggagtagcggaggtggaagtggtggctctggttctggtgggggcagtggggggtccgccccgcctggaatgaggttgcgctctggcagatccacaggtgccccccttacgcgaggaagccccaagaagaagaggaaagtcggaagcgga

SEQ ID NO: 279 - DNA, 5037 bp, synthetic construct
  source 1..5037: mol_type = other DNA
atgaaacggacagccgacggaagcgagttcgagtcaccaaagaagaagcggaaagtctctgaggttgaattttcacatgagtattggatgagacacgctcttaccttggctaagagagcaagggatgagagagaagttccagtgggagcagttcttgtgttgaacaatagagttattggagagggttggaacagggctattggacttcatgatcctactgctcacgcagaaattatggcacttagacaaggtggacttgttatgcagaactacaggcttatcgatgctactctttatgttacattcgagccatgtgtgatgtgcgctggagcaatgattcattctaggattggaagggttgtgttcggtgttagaaactctaagaggggagctgcaggttcacttatgaacgttttgaattatcctggtatgaaccacagagtggagattactgaaggtattttggcagatgaatgtgctgcacttttgtgcgatttttacagaatgcctagacaagtgttcaacgctcaaaagaaggcacaatcttctattaactctggaggatctagcggaggatcctctggcagcgagacaccaggaacaagcgagtcagcaacaccagagagcagtggcggcagcagcggcggcagctccaagctggagaagtttacaaactgttacagcctctccaaaaccctcaggtttaaagcgatcccggtgggcaagacccaggagaacatcgacaacaagaggctcctggtggaagacgagaagcgcgccgaagactacaagggcgtgaagaagctgctcgataggtactacctcagctttattaacgacgtgctgcacagcatcaaactcaagaatctcaacaactacatctccctcttccgcaaaaagacccgcaccgagaaggagaacaaggagctggagaacctggagatcaacctccgcaaggaaatcgccaaagcgttcaagggcaatgaagggtacaagagcctcttcaagaaagacatcatcgaaactatcctcccagagtttctcgatgacaaggacgagatcgcgctggtgaactcctttaacgggttcacaaccgcgtttaccggcttctttgataacagggaaaatatgttctccgaggaggccaagtccaccagcatcgccttcaggtgtatcaacgagaacctcacccgctacatttccaatatggacattttcgagaaggtggatgcgatcttcgataagcacgaggtgcaggagatcaaagagaagattctcaattccgattatgacgtcgaggatttcttcgaaggggagttctttaattttgtgctcacacaagagggcattgacgtgtacaacgcgattatcgggggcttcgtcacagagtccggggagaagattaaggggctgaatgagtacatcaatctgtacaatcagaagaccaagcagaaactgccgaaattcaagccgctctacaagcaagtcctgtccgatagggaaagcctctccttctacggcgagaaccagaccacccagaagggacagaagaacagccgcgagagaatgaagcggatcgaagagggcatcaaagagctgggcagccagatcctgaaagaacaccccgtggaaaacacccagctgcagaacgagaagctgtacctgtactacctgcagaatgggcgggatatgtacgtggaccaggaactggacatcaaccggctgtccgactacgatgtggaccatatcgtgcctcagagctttctgaaggacgactccatcgacaacaaggtgctgaccagaagcgacaagaaccggggcaagagcgacaacgtgccctccgaagaggtcgtgaagaagatgaagaactactggcggcagctgctgaacgccaagctgattacccagagaaagttcgacaatctgaccaaggccgagagaggcggcctgagcgagggctataccagcgacgaggaggtgctggaagtcttccgcaacacactgaataagaatagcgagattttctcctccatcaagaagctcgagaagctctttaagaactttgacgagtacagctccgccgggattttcgtgaagaacgggccggcgatcagcaccatctccaaggacatctttggcgagtggaacgtcatcagggacaagtggaacgccgagtacgacgacatccacctgaagaagaaggcggtggtgaccgagaagtatgaggacgatcgcaggaagtccttcaaaaaaatcggctccttcagcctcgaacagctccaggagtatgccgatgcggatctgtccgtcgtcgagaagctgaaggaaatcatcattcagaaggtcgacgagatctataaagtgtacgggtccagcgagaagctgttcgacgccgactttgtgctcgagaagtccctcaaaaagaatgacgccgtggtggccattatgaaagacctgctcgactccgtgaagtccttcgaaaattacattaaagcgttctttggggaggggaaggaaactaacagggatgagtccttctatggcgactttgtcctcgcgtacgacatcctgctgaaggtcgaccacatttacgacgcgatccgcaactacgtgacacagaagccgtactccaaagacaagttcaagctgtacttccagaacccgcaatttatggggggctgggacaaggataaagagacagactaccgcgcgacaattctccgctatggctccaaatactatctggccatcatggacaagaagtacgcgaagtgcctgcagaagatcgacaaagacgacgtcaatggcaactatgaaaagatcaactacaagctgctgccgggcccgaacaagatgctcccgaaggtgttcttcagcaagaagtggatggcctactacaatccaagcgaggatattcagaaaatctataaaaacgggaccttcaagaagggggacatgtttaacctcaacgactgccacaagctcattgatttcttcaaggatagcatttcccgctacccgaaatggtccaatgcgtacgattttaacttctccgagacagaaaagtacaaagacatcgcgggcttttacagggaggtggaggagcaagggtataaagtttcttttgaatccgcgagcaagaaggaagtcgacaagctcgtcgaggagggcaagctctacatgttccaaatttataacaaggacttttccgacaagagccatgggaccccaaacctccacaccatgtacttcaaactgctctttgacgagaacaaccacgggcaaatcaggctgagcggcggcgccgaattattcatgcgcagggcctccctcaagaaggaagagctggtcgtccatccagccaattccccgatcgcgaacaagaacccggacaatccgaaaaagaccaccaccctgtcctacgacgtctacaaggacaaacgcttcagcgaagaccagtacgaattacacatcccaattgcgattaataagtgcccaaagaatatcttcaaaattaatacagaggtcagggtgctgctcaaacacgacgacaatccgtatgtcatcggcattgccaggggcgagcgcaatctgctctatatcgtggtcgtggatgggaagggcaatattgtggagcagtactccctgaacgagattatcaacaacttcaatgggattaggattaagaccgactatcacagcctgctcgacaagaaagaaaaagagaggtttgaggcccgccaaaactggacctccattgagaatatcaaagaattaaaggccggctatatttcccaagtcgtccacaagatctgcgagctggtggagaaatatgacgccgtgattgcgctcgaagacttaaattctgggttcaagaactcccgcgtgaaggtggaaaaacaggtgtatcagaaattcgagaaaatgctgatcgacaaactcaattatatggtggataagaagtccaacccgtgtgccacagggggcgcgctgaagggctatcagatcaccaacaagttcgagagcttcaagagcatgagcacccagaacgggtttattttctacatcccggcgtggctcacctccaagattgacccgagcaccggcttcgtgaacctcctgaagacaaagtatacctccattgccgacagcaagaagtttatctcctccttcgaccgcattatgtatgtgccggaggaggacctcttcgagttcgccctcgactacaaaaacttcagccgcacagatgcggattacatcaagaagtggaagctgtactcctacgggaacaggatccgcatcttcaggaatccaaaaaaaaataacgtctttgactgggaggaagtgtgcctgacatccgcctacaaggaactgttcaataaatacggcatcaattaccagcagggcgacattcgcgccctcctctgtgagcagtccgacaaagcgttttactccagcttcatggccctcatgtccctgatgctccaaatgaggaatagcatcacagggcgcaccgacgtcgacttcctcatcagcccggtgaagaactccgacgggatcttttacgactcccgcaactatgaggcgcaagagaatgcgatcctcccgaagaacgccgatgcgaacggggcctataatatcgccaggaaagtgctctgggccatcgggcagttcaaaaaggcggaggatgagaagctcgacaaggtgaaaattgccatttccaacaaggagtggctggagtacgcgcagacctccgtgaagcactctggcggctcaaaaagaaccgccgacggcagcgaattcgagggtagttccggcgggtcaagtgggggaggctccagtgggagtagcggaggtggaagtggtggctctggttctggtgggggcagtggggggtccgaacccgaagaggagagaatacggtactcacaaagactccgcgggacaatgcgcaggagatacgaggatgacgggatatccgacgatgagatcgagggcaagggaagtcccaagaagaagaggaaagtcggaagcgga

SEQ ID NO: 280 - protein, 1371 aa, synthetic construct
SKLEKFTNCYSLSKTLRFKAIPVGKTQENIDNKRLLVEDEKRAEDYKGVKKLLDRYYLSFINDVLHSIKLKNLNNYISLFRKKTRTEKENKELENLEINLRKEIAKAFKGNEGYKSLFKKDIIETILPEFLDDKDEIALVNSFNGFTTAFTGFFDNRENMFSEEAKSTSIAFRCINENLTRYISNMDIFEKVDAIFDKHEVQEIKEKILNSDYDVEDFFEGEFFNFVLTQEGIDVYNAIIGGFVTESGEKIKGLNEYINLYNQKTKQKLPKFKPLYKQVLSDRESLSFYGENQTTQKGQKNSRERMKRIEEGIKELGSQILKEHPVENTQLQNEKLYLYYLQNGRDMYVDQELDINRLSDYDVDHIVPQSFLKDDSIDNKVLTRSDKNRGKSDNVPSEEVVKKMKNYWRQLLNAKLITQRKFDNLTKAERGGLSEGYTSDEEVLEVFRNTLNKNSEIFSSIKKLEKLFKNFDEYSSAGIFVKNGPAISTISKDIFGEWNVIRDKWNAEYDDIHLKKKAVVTEKYEDDRRKSFKKIGSFSLEQLQEYADADLSVVEKLKEIIIQKVDEIYKVYGSSEKLFDADFVLEKSLKKNDAVVAIMKDLLDSVKSFENYIKAFFGEGKETNRDESFYGDFVLAYDILLKVDHIYDAIRNYVTQKPYSKDKFKLYFQNPQFMGGWDKDKETDYRATILRYGSKYYLAIMDKKYAKCLQKIDKDDVNGNYEKINYKLLPGPNKMLPKVFFSKKWMAYYNPSEDIQKIYKNGTFKKGDMFNLNDCHKLIDFFKDSISRYPKWSNAYDFNFSETEKYKDIAGFYREVEEQGYKVSFESASKKEVDKLVEEGKLYMFQIYNKDFSDKSHGTPNLHTMYFKLLFDENNHGQIRLSGGAELFMRRASLKKEELVVHPANSPIANKNPDNPKKTTTLSYDVYKDKRFSEDQYELHIPIAINKCPKNIFKINTEVRVLLKHDDNPYVIGIARGERNLLYIVVVDGKGNIVEQYSLNEIINNFNGIRIKTDYHSLLDKKEKERFEARQNWTSIENIKELKAGYISQVVHKICELVEKYDAVIALEDLNSGFKNSRVKVEKQVYQKFEKMLIDKLNYMVDKKSNPCATGGALKGYQITNKFESFKSMSTQNGFIFYIPAWLTSKIDPSTGFVNLLKTKYTSIADSKKFISSFDRIMYVPEEDLFEFALDYKNFSRTDADYIKKWKLYSYGNRIRIFRNPKKNNVFDWEEVCLTSAYKELFNKYGINYQQGDIRALLCEQSDKAFYSSFMALMSLMLQMRNSITGRTDVDFLISPVKNSDGIFYDSRNYEAQENAILPKNADANGAYNIARKVLWAIGQFKKAEDEKLDKVKIAISNKEWLEYAQTSVKH

SEQ ID NO: 281 - protein, 1373 aa, synthetic construct
SKLEKFTNCYSLSKTLRFKAIPVGKTQENIDNKRLLVEDEKRAEDYKGVKKLLDRYYLSFINDVLHSIKLKNLNNYISLFRKKTRTEKENKELENLEINLRKEIAKAFKGNEGYKSLFKKDIIETILPEFLDDKDEIALVNSFNGFTTAFTGFFDNRENMFSEEAKSTSIAFRCINENLTRYISNMDIFEKVDAIFDKHEVQEIKEKILNSDYDVEDFFEGEFFNFVLTQEGIDVYNAIIGGFVTESGEKIKGLNEYINLYNQKTKQKLPKFKPLYKQVLSDRESLSFYGSGENQTTQKGQKNSRERMKRIEEGIKELGSQILKEHPVENTQLQNEKLYLYYLQNGRDMYVDQELDINRLSDYDVDHIVPQSFLKDDSIDNKVLTRSDKNRGKSDNVPSEEVVKKMKNYWRQLLNAKLITQRKFDNLTKAERGGLSEGYTSDEEVLEVFRNTLNKNSEIFSSIKKLEKLFKNFDEYSSAGIFVKNGPAISTISKDIFGEWNVIRDKWNAEYDDIHLKKKAVVTEKYEDDRRKSFKKIGSFSLEQLQEYADADLSVVEKLKEIIIQKVDEIYKVYGSSEKLFDADFVLEKSLKKNDAVVAIMKDLLDSVKSFENYIKAFFGEGKETNRDESFYGDFVLAYDILLKVDHIYDAIRNYVTQKPYSKDKFKLYFQNPQFMGGWDKDKETDYRATILRYGSKYYLAIMDKKYAKCLQKIDKDDVNGNYEKINYKLLPGPNKMLPKVFFSKKWMAYYNPSEDIQKIYKNGTFKKGDMFNLNDCHKLIDFFKDSISRYPKWSNAYDFNFSETEKYKDIAGFYREVEEQGYKVSFESASKKEVDKLVEEGKLYMFQIYNKDFSDKSHGTPNLHTMYFKLLFDENNHGQIRLSGGAELFMRRASLKKEELVVHPANSPIANKNPDNPKKTTTLSYDVYKDKRFSEDQYELHIPIAINKCPKNIFKINTEVRVLLKHDDNPYVIGIARGERNLLYIVVVDGKGNIVEQYSLNEIINNFNGIRIKTDYHSLLDKKEKERFEARQNWTSIENIKELKAGYISQVVHKICELVEKYDAVIALEDLNSGFKNSRVKVEKQVYQKFEKMLIDKLNYMVDKKSNPCATGGALKGYQITNKFESFKSMSTQNGFIFYIPAWLTSKIDPSTGFVNLLKTKYTSIADSKKFISSFDRIMYVPEEDLFEFALDYKNFSRTDADYIKKWKLYSYGNRIRIFRNPKKNNVFDWEEVCLTSAYKELFNKYGINYQQGDIRALLCEQSDKAFYSSFMALMSLMLQMRNSITGRTDVDFLISPVKNSDGIFYDSRNYEAQENAILPKNADANGAYNIARKVLWAIGQFKKAEDEKLDKVKIAISNKEWLEYAQTSVKH

SEQ ID NO: 282 - protein, 1375 aa, synthetic construct
SKLEKFTNCYSLSKTLRFKAIPVGKTQENIDNKRLLVEDEKRAEDYKGVKKLLDRYYLSFINDVLHSIKLKNLNNYISLFRKKTRTEKENKELENLEINLRKEIAKAFKGNEGYKSLFKKDIIETILPEFLDDKDEIALVNSFNGFTTAFTGFFDNRENMFSEEAKSTSIAFRCINENLTRYISNMDIFEKVDAIFDKHEVQEIKEKILNSDYDVEDFFEGEFFNFVLTQEGIDVYNAIIGGFVTESGEKIKGLNEYINLYNQKTKQKLPKFKPLYKQVLSDRESLSFYGGSSGENQTTQKGQKNSRERMKRIEEGIKELGSQILKEHPVENTQLQNEKLYLYYLQNGRDMYVDQELDINRLSDYDVDHIVPQSFLKDDSIDNKVLTRSDKNRGKSDNVPSEEVVKKMKNYWRQLLNAKLITQRKFDNLTKAERGGLSEGYTSDEEVLEVFRNTLNKNSEIFSSIKKLEKLFKNFDEYSSAGIFVKNGPAISTISKDIFGEWNVIRDKWNAEYDDIHLKKKAVVTEKYEDDRRKSFKKIGSFSLEQLQEYADADLSVVEKLKEIIIQKVDEIYKVYGSSEKLFDADFVLEKSLKKNDAVVAIMKDLLDSVKSFENYIKAFFGEGKETNRDESFYGDFVLAYDILLKVDHIYDAIRNYVTQKPYSKDKFKLYFQNPQFMGGWDKDKETDYRATILRYGSKYYLAIMDKKYAKCLQKIDKDDVNGNYEKINYKLLPGPNKMLPKVFFSKKWMAYYNPSEDIQKIYKNGTFKKGDMFNLNDCHKLIDFFKDSISRYPKWSNAYDFNFSETEKYKDIAGFYREVEEQGYKVSFESASKKEVDKLVEEGKLYMFQIYNKDFSDKSHGTPNLHTMYFKLLFDENNHGQIRLSGGAELFMRRASLKKEELVVHPANSPIANKNPDNPKKTTTLSYDVYKDKRFSEDQYELHIPIAINKCPKNIFKINTEVRVLLKHDDNPYVIGIARGERNLLYIVVVDGKGNIVEQYSLNEIINNFNGIRIKTDYHSLLDKKEKERFEARQNWTSIENIKELKAGYISQVVHKICELVEKYDAVIALEDLNSGFKNSRVKVEKQVYQKFEKMLIDKLNYMVDKKSNPCATGGALKGYQITNKFESFKSMSTQNGFIFYIPAWLTSKIDPSTGFVNLLKTKYTSIADSKKFISSFDRIMYVPEEDLFEFALDYKNFSRTDADYIKKWKLYSYGNRIRIFRNPKKNNVFDWEEVCLTSAYKELFNKYGINYQQGDIRALLCEQSDKAFYSSFMALMSLMLQMRNSITGRTDVDFLISPVKNSDGIFYDSRNYEAQENAILPKNADANGAYNIARKVLWAIGQFKKAEDEKLDKVKIAISNKEWLEYAQTSVKH

SEQ ID NO: 283 - protein, 1377 aa, synthetic construct
SKLEKFTNCYSLSKTLRFKAIPVGKTQENIDNKRLLVEDEKRAEDYKGVKKLLDRYYLSFINDVLHSIKLKNLNNYISLFRKKTRTEKENKELENLEINLRKEIAKAFKGNEGYKSLFKKDIIETILPEFLDDKDEIALVNSFNGFTTAFTGFFDNRENMFSEEAKSTSIAFRCINENLTRYISNMDIFEKVDAIFDKHEVQEIKEKILNSDYDVEDFFEGEFFNFVLTQEGIDVYNAIIGGFVTESGEKIKGLNEYINLYNQKTKQKLPKFKPLYKQVLSDRESLSFYGGSSGENQTTQKGQKNSRERMKRIEEGIKELGSQILKEHPVENTQLQNEKLYLYYLQNGRDMYVDQELDINRLSDYDVDHIVPQSFLKDDSIDNKVLTRSDKNRGKSDNVPSEEVVKKMKNYWRQLLNAKLITQRKFDNLTKAERGGLSGSEGYTSDEEVLEVFRNTLNKNSEIFSSIKKLEKLFKNFDEYSSAGIFVKNGPAISTISKDIFGEWNVIRDKWNAEYDDIHLKKKAVVTEKYEDDRRKSFKKIGSFSLEQLQEYADADLSVVEKLKEIIIQKVDEIYKVYGSSEKLFDADFVLEKSLKKNDAVVAIMKDLLDSVKSFENYIKAFFGEGKETNRDESFYGDFVLAYDILLKVDHIYDAIRNYVTQKPYSKDKFKLYFQNPQFMGGWDKDKETDYRATILRYGSKYYLAIMDKKYAKCLQKIDKDDVNGNYEKINYKLLPGPNKMLPKVFFSKKWMAYYNPSEDIQKIYKNGTFKKGDMFNLNDCHKLIDFFKDSISRYPKWSNAYDFNFSETEKYKDIAGFYREVEEQGYKVSFESASKKEVDKLVEEGKLYMFQIYNKDFSDKSHGTPNLHTMYFKLLFDENNHGQIRLSGGAELFMRRASLKKEELVVHPANSPIANKNPDNPKKTTTLSYDVYKDKRFSEDQYELHIPIAINKCPKNIFKINTEVRVLLKHDDNPYVIGIARGERNLLYIVVVDGKGNIVEQYSLNEIINNFNGIRIKTDYHSLLDKKEKERFEARQNWTSIENIKELKAGYISQVVHKICELVEKYDAVIALEDLNSGFKNSRVKVEKQVYQKFEKMLIDKLNYMVDKKSNPCATGGALKGYQITNKFESFKSMSTQNGFIFYIPAWLTSKIDPSTGFVNLLKTKYTSIADSKKFISSFDRIMYVPEEDLFEFALDYKNFSRTDADYIKKWKLYSYGNRIRIFRNPKKNNVFDWEEVCLTSAYKELFNKYGINYQQGDIRALLCEQSDKAFYSSFMALMSLMLQMRNSITGRTDVDFLISPVKNSDGIFYDSRNYEAQENAILPKNADANGAYNIARKVLWAIGQFKKAEDEKLDKVKIAISNKEWLEYAQTSVKH

SEQ ID NO: 284 - protein, 1371 aa, synthetic construct
SKLEKFTNCYSLSKTLRFKAIPVGKTQENIDNKRLLVEDEKRAEDYKGVKKLLDRYYLSFINDVLHSIKLKNLNNYISLFRKKTRTEKENKELENLEINLRKEIAKAFKGNEGYKSLFKKDIIETILPEFLDDKDEIALVNSFNGFTTAFTGFFDNRENMFSEEAKSTSIAFRCINENLTRYISNMDIFEKVDAIFDKHEVQEIKEKILNSDYDVEDFFEGEFFNFVLTQEGIDVYNAIIGGFVTESGEKIKGLNEYINLYNQKTKQKLPKFKPLYKQVLSDRESLSFYGEENQTTQKGQKNSRERMKRIEEGIKELGSQILKEHPVENTQLQNEKLYLYYLQNGRDMYVDQELDINRLSDYDVDHIVPQSFLKDDSIDNKVLTRSDKNRGKSDNVPSEEVVKKMKNYWRQLLNAKLITQRKFDNLTKAERGGLSGYTSDEEVLEVFRNTLNKNSEIFSSIKKLEKLFKNFDEYSSAGIFVKNGPAISTISKDIFGEWNVIRDKWNAEYDDIHLKKKAVVTEKYEDDRRKSFKKIGSFSLEQLQEYADADLSVVEKLKEIIIQKVDEIYKVYGSSEKLFDADFVLEKSLKKNDAVVAIMKDLLDSVKSFENYIKAFFGEGKETNRDESFYGDFVLAYDILLKVDHIYDAIRNYVTQKPYSKDKFKLYFQNPQFMGGWDKDKETDYRATILRYGSKYYLAIMDKKYAKCLQKIDKDDVNGNYEKINYKLLPGPNKMLPKVFFSKKWMAYYNPSEDIQKIYKNGTFKKGDMFNLNDCHKLIDFFKDSISRYPKWSNAYDFNFSETEKYKDIAGFYREVEEQGYKVSFESASKKEVDKLVEEGKLYMFQIYNKDFSDKSHGTPNLHTMYFKLLFDENNHGQIRLSGGAELFMRRASLKKEELVVHPANSPIANKNPDNPKKTTTLSYDVYKDKRFSEDQYELHIPIAINKCPKNIFKINTEVRVLLKHDDNPYVIGIARGERNLLYIVVVDGKGNIVEQYSLNEIINNFNGIRIKTDYHSLLDKKEKERFEARQNWTSIENIKELKAGYISQVVHKICELVEKYDAVIALEDLNSGFKNSRVKVEKQVYQKFEKMLIDKLNYMVDKKSNPCATGGALKGYQITNKFESFKSMSTQNGFIFYIPAWLTSKIDPSTGFVNLLKTKYTSIADSKKFISSFDRIMYVPEEDLFEFALDYKNFSRTDADYIKKWKLYSYGNRIRIFRNPKKNNVFDWEEVCLTSAYKELFNKYGINYQQGDIRALLCEQSDKAFYSSFMALMSLMLQMRNSITGRTDVDFLISPVKNSDGIFYDSRNYEAQENAILPKNADANGAYNIARKVLWAIGQFKKAEDEKLDKVKIAISNKEWLEYAQTSVKH

SEQ ID NO: 285 - protein, 1373 aa, synthetic construct
SKLEKFTNCYSLSKTLRFKAIPVGKTQENIDNKRLLVEDEKRAEDYKGVKKLLDRYYLSFINDVLHSIKLKNLNNYISLFRKKTRTEKENKELENLEINLRKEIAKAFKGNEGYKSLFKKDIIETILPEFLDDKDEIALVNSFNGFTTAFTGFFDNRENMFSEEAKSTSIAFRCINENLTRYISNMDIFEKVDAIFDKHEVQEIKEKILNSDYDVEDFFEGEFFNFVLTQEGIDVYNAIIGGFVTESGEKIKGLNEYINLYNQKTKQKLPKFKPLYKQVLSDRESLSFYGEGSENQTTQKGQKNSRERMKRIEEGIKELGSQILKEHPVENTQLQNEKLYLYYLQNGRDMYVDQELDINRLSDYDVDHIVPQSFLKDDSIDNKVLTRSDKNRGKSDNVPSEEVVKKMKNYWRQLLNAKLITQRKFDNLTKAERGGLSGYTSDEEVLEVFRNTLNKNSEIFSSIKKLEKLFKNFDEYSSAGIFVKNGPAISTISKDIFGEWNVIRDKWNAEYDDIHLKKKAVVTEKYEDDRRKSFKKIGSFSLEQLQEYADADLSVVEKLKEIIIQKVDEIYKVYGSSEKLFDADFVLEKSLKKNDAVVAIMKDLLDSVKSFENYIKAFFGEGKETNRDESFYGDFVLAYDILLKVDHIYDAIRNYVTQKPYSKDKFKLYFQNPQFMGGWDKDKETDYRATILRYGSKYYLAIMDKKYAKCLQKIDKDDVNGNYEKINYKLLPGPNKMLPKVFFSKKWMAYYNPSEDIQKIYKNGTFKKGDMFNLNDCHKLIDFFKDSISRYPKWSNAYDFNFSETEKYKDIAGFYREVEEQGYKVSFESASKKEVDKLVEEGKLYMFQIYNKDFSDKSHGTPNLHTMYFKLLFDENNHGQIRLSGGAELFMRRASLKKEELVVHPANSPIANKNPDNPKKTTTLSYDVYKDKRFSEDQYELHIPIAINKCPKNIFKINTEVRVLLKHDDNPYVIGIARGERNLLYIVVVDGKGNIVEQYSLNEIINNFNGIRIKTDYHSLLDKKEKERFEARQNWTSIENIKELKAGYISQVVHKICELVEKYDAVIALEDLNSGFKNSRVKVEKQVYQKFEKMLIDKLNYMVDKKSNPCATGGALKGYQITNKFESFKSMSTQNGFIFYIPAWLTSKIDPSTGFVNLLKTKYTSIADSKKFISSFDRIMYVPEEDLFEFALDYKNFSRTDADYIKKWKLYSYGNRIRIFRNPKKNNVFDWEEVCLTSAYKELFNKYGINYQQGDIRALLCEQSDKAFYSSFMALMSLMLQMRNSITGRTDVDFLISPVKNSDGIFYDSRNYEAQENAILPKNADANGAYNIARKVLWAIGQFKKAEDEKLDKVKIAISNKEWLEYAQTSVKH

SEQ ID NO: 286 - protein, 1375 aa, synthetic construct
SKLEKFTNCYSLSKTLRFKAIPVGKTQENIDNKRLLVEDEKRAEDYKGVKKLLDRYYLSFINDVLHSIKLKNLNNYISLFRKKTRTEKENKELENLEINLRKEIAKAFKGNEGYKSLFKKDIIETILPEFLDDKDEIALVNSFNGFTTAFTGFFDNRENMFSEEAKSTSIAFRCINENLTRYISNMDIFEKVDAIFDKHEVQEIKEKILNSDYDVEDFFEGEFFNFVLTQEGIDVYNAIIGGFVTESGEKIKGLNEYINLYNQKTKQKLPKFKPLYKQVLSDRESLSFYGEGSSGENQTTQKGQKNSRERMKRIEEGIKELGSQILKEHPVENTQLQNEKLYLYYLQNGRDMYVDQELDINRLSDYDVDHIVPQSFLKDDSIDNKVLTRSDKNRGKSDNVPSEEVVKKMKNYWRQLLNAKLITQRKFDNLTKAERGGLSGYTSDEEVLEVFRNTLNKNSEIFSSIKKLEKLFKNFDEYSSAGIFVKNGPAISTISKDIFGEWNVIRDKWNAEYDDIHLKKKAVVTEKYEDDRRKSFKKIGSFSLEQLQEYADADLSVVEKLKEIIIQKVDEIYKVYGSSEKLFDADFVLEKSLKKNDAVVAIMKDLLDSVKSFENYIKAFFGEGKETNRDESFYGDFVLAYDILLKVDHIYDAIRNYVTQKPYSKDKFKLYFQNPQFMGGWDKDKETDYRATILRYGSKYYLAIMDKKYAKCLQKIDKDDVNGNYEKINYKLLPGPNKMLPKVFFSKKWMAYYNPSEDIQKIYKNGTFKKGDMFNLNDCHKLIDFFKDSISRYPKWSNAYDFNFSETEKYKDIAGFYREVEEQGYKVSFESASKKEVDKLVEEGKLYMFQIYNKDFSDKSHGTPNLHTMYFKLLFDENNHGQIRLSGGAELFMRRASLKKEELVVHPANSPIANKNPDNPKKTTTLSYDVYKDKRFSEDQYELHIPIAINKCPKNIFKINTEVRVLLKHDDNPYVIGIARGERNLLYIVVVDGKGNIVEQYSLNEIINNFNGIRIKTDYHSLLDKKEKERFEARQNWTSIENIKELKAGYISQVVHKICELVEKYDAVIALEDLNSGFKNSRVKVEKQVYQKFEKMLIDKLNYMVDKKSNPCATGGALKGYQITNKFESFKSMSTQNGFIFYIPAWLTSKIDPSTGFVNLLKTKYTSIADSKKFISSFDRIMYVPEEDLFEFALDYKNFSRTDADYIKKWKLYSYGNRIRIFRNPKKNNVFDWEEVCLTSAYKELFNKYGINYQQGDIRALLCEQSDKAFYSSFMALMSLMLQMRNSITGRTDVDFLISPVKNSDGIFYDSRNYEAQENAILPKNADANGAYNIARKVLWAIGQFKKAEDEKLDKVKIAISNKEWLEYAQTSVKH

SEQ ID NO: 287 - protein, 1377 aa, synthetic construct
SKLEKFTNCYSLSKTLRFKAIPVGKTQENIDNKRLLVEDEKRAEDYKGVKKLLDRYYLSFINDVLHSIKLKNLNNYISLFRKKTRTEKENKELENLEINLRKEIAKAFKGNEGYKSLFKKDIIETILPEFLDDKDEIALVNSFNGFTTAFTGFFDNRENMFSEEAKSTSIAFRCINENLTRYISNMDIFEKVDAIFDKHEVQEIKEKILNSDYDVEDFFEGEFFNFVLTQEGIDVYNAIIGGFVTESGEKIKGLNEYINLYNQKTKQKLPKFKPLYKQVLSDRESLSFYGEGSSGENQTTQKGQKNSRERMKRIEEGIKELGSQILKEHPVENTQLQNEKLYLYYLQNGRDMYVDQELDINRLSDYDVDHIVPQSFLKDDSIDNKVLTRSDKNRGKSDNVPSEEVVKKMKNYWRQLLNAKLITQRKFDNLTKAERGGLSGSGYTSDEEVLEVFRNTLNKNSEIFSSIKKLEKLFKNFDEYSSAGIFVKNGPAISTISKDIFGEWNVIRDKWNAEYDDIHLKKKAVVTEKYEDDRRKSFKKIGSFSLEQLQEYADADLSVVEKLKEIIIQKVDEIYKVYGSSEKLFDADFVLEKSLKKNDAVVAIMKDLLDSVKSFENYIKAFFGEGKETNRDESFYGDFVLAYDILLKVDHIYDAIRNYVTQKPYSKDKFKLYFQNPQFMGGWDKDKETDYRATILRYGSKYYLAIMDKKYAKCLQKIDKDDVNGNYEKINYKLLPGPNKMLPKVFFSKKWMAYYNPSEDIQKIYKNGTFKKGDMFNLNDCHKLIDFFKDSISRYPKWSNAYDFNFSETEKYKDIAGFYREVEEQGYKVSFESASKKEVDKLVEEGKLYMFQIYNKDFSDKSHGTPNLHTMYFKLLFDENNHGQIRLSGGAELFMRRASLKKEELVVHPANSPIANKNPDNPKKTTTLSYDVYKDKRFSEDQYELHIPIAINKCPKNIFKINTEVRVLLKHDDNPYVIGIARGERNLLYIVVVDGKGNIVEQYSLNEIINNFNGIRIKTDYHSLLDKKEKERFEARQNWTSIENIKELKAGYISQVVHKICELVEKYDAVIALEDLNSGFKNSRVKVEKQVYQKFEKMLIDKLNYMVDKKSNPCATGGALKGYQITNKFESFKSMSTQNGFIFYIPAWLTSKIDPSTGFVNLLKTKYTSIADSKKFISSFDRIMYVPEEDLFEFALDYKNFSRTDADYIKKWKLYSYGNRIRIFRNPKKNNVFDWEEVCLTSAYKELFNKYGINYQQGDIRALLCEQSDKAFYSSFMALMSLMLQMRNSITGRTDVDFLISPVKNSDGIFYDSRNYEAQENAILPKNADANGAYNIARKVLWAIGQFKKAEDEKLDKVKIAISNKEWLEYAQTSVKH

SEQ ID NO: 288 - protein, 1302 aa, synthetic construct
MAGSKKRRIKQDSKLEKFTNCYSLSKTLRFKAIPVGKTQENIDNKRLLVEDEKRAEDYKGVKKLLDRYYLSFINDVLHSIKLKNLNNYISLFRKKTRTEKENKELENLEINLRKEIAKAFKGNEGYKSLFKKDIIETILPEFLDDKDEIALVNSFNGFTTAFTGFFDNRENMFSEEAKSTSIAFRCINENLTRYISNMDIFEKVDAIFDKHEVQEIKEKILNSDYDVEDFFEGEFFNFVLTQEGIDVYNAIIGGFVTESGEKIKGLNEYINLYNQKTKQKLPKFKPLYKQVLSDRESLSFYGEGYTSDEEVLEVFRNTLNKNSEIFSSIKKLEKLFKNFDEYSSAGIFVKNGPAISTISKDIFGEWNVIRDKWNAEYDDIHLKKKAVVTEKYEDDRRKSFKKIGSFSLEQLQEYADADLSVVEKLKEIIIQKVDEIYKVYGSSEKLFDADFVLEKSLKKNDAVVAIMKDLLDSVKSFENYIKAFFGEGKETNRDESFYGDFVLAYDILLKVDHIYDAIRNYVTQKPYSKDKFKLYFQNPQFMRGWDKDKETDYRATILRYGSKYYLAIMDKKYAKCLQKIDKDDVNGNYEKINYKLLPGPNKMLPRVFFSKKWMAYYNPSEDIQKIYKNGTFKKGDMFNLNDCHKLIDFFKDSISRYPKWSNAYDFNFSETEKYKDIAGFYREVEEQGYKVSFESASKKEVDKLVEEGKLYMFQIYNKDFSDKSHGTPNLHTMYFKLLFDENNHGQIRLSGGAELFMRRASLKKEELVVHPANSPIANKNPDNPKKTTTLSYDVYKDKRFSEDQYELHIPIAINKCPKNIFKINTEVRVLLKHDDNPYVIGIDRGERNLLYIVVVDGKGNIVEQYSLNEIINNFNGIRIKTDYHSLLDKKEKERFEARQNWTSIENIKELKAGYISQVVHKICELVEKYDAVIALEDLNSGFKNSRVKVEKQVYQKFEKMLIDKLNYMVDKKSNPCATGGALKGYQITNKFESFKSMSTQNGFIFYIPAWLTSKIDPSTGFVNLLKTKYTSIADSKKFISSFDRIMYVPEEDLFEFALDYKNFSRTDADYIKKWKLYSYGNRIRIFRNPKKNNVFDWEEVCLTSAYKELFNKYGINYQQGDIRALLCEQSDKAFYSSFMALMSLMLQMRNSITGRTDVDFLISPVKNSDGIFYDSRNYEAQENAILPKNADANGAYNIARKVLWAIGQFKKAEDEKLDKVKIAISNKEWLEYAQTSVKHSGGSSGGSSGSETPGTSESATPESSGGSSGGSAPPGMRLRSGRSTGAPLTRGSGSKKRRIKQD

SEQ ID NO: 289 - protein, 1315 aa, synthetic construct
MAGSKKRRIKQDSKLEKFTNCYSLSKTLRFKAIPVGKTQENIDNKRLLVEDEKRAEDYKGVKKLLDRYYLSFINDVLHSIKLKNLNNYISLFRKKTRTEKENKELENLEINLRKEIAKAFKGNEGYKSLFKKDIIETILPEFLDDKDEIALVNSFNGFTTAFTGFFDNRENMFSEEAKSTSIAFRCINENLTRYISNMDIFEKVDAIFDKHEVQEIKEKILNSDYDVEDFFEGEFFNFVLTQEGIDVYNAIIGGFVTESGEKIKGLNEYINLYNQKTKQKLPKFKPLYKQVLSDRESLSFYGEGYTSDEEVLEVFRNTLNKNSEIFSSIKKLEKLFKNFDEYSSAGIFVKNGPAISTISKDIFGEWNVIRDKWNAEYDDIHLKKKAVVTEKYEDDRRKSFKKIGSFSLEQLQEYADADLSVVEKLKEIIIQKVDEIYKVYGSSEKLFDADFVLEKSLKKNDAVVAIMKDLLDSVKSFENYIKAFFGEGKETNRDESFYGDFVLAYDILLKVDHIYDAIRNYVTQKPYSKDKFKLYFQNPQFMRGWDKDKETDYRATILRYGSKYYLAIMDKKYAKCLQKIDKDDVNGNYEKINYKLLPGPNKMLPRVFFSKKWMAYYNPSEDIQKIYKNGTFKKGDMFNLNDCHKLIDFFKDSISRYPKWSNAYDFNFSETEKYKDIAGFYREVEEQGYKVSFESASKKEVDKLVEEGKLYMFQIYNKDFSDKSHGTPNLHTMYFKLLFDENNHGQIRLSGGAELFMRRASLKKEELVVHPANSPIANKNPDNPKKTTTLSYDVYKDKRFSEDQYELHIPIAINKCPKNIFKINTEVRVLLKHDDNPYVIGIDRGERNLLYIVVVDGKGNIVEQYSLNEIINNFNGIRIKTDYHSLLDKKEKERFEARQNWTSIENIKELKAGYISQVVHKICELVEKYDAVIALEDLNSGFKNSRVKVEKQVYQKFEKMLIDKLNYMVDKKSNPCATGGALKGYQITNKFESFKSMSTQNGFIFYIPAWLTSKIDPSTGFVNLLKTKYTSIADSKKFISSFDRIMYVPEEDLFEFALDYKNFSRTDADYIKKWKLYSYGNRIRIFRNPKKNNVFDWEEVCLTSAYKELFNKYGINYQQGDIRALLCEQSDKAFYSSFMALMSLMLQMRNSITGRTDVDFLISPVKNSDGIFYDSRNYEAQENAILPKNADANGAYNIARKVLWAIGQFKKAEDEKLDKVKIAISNKEWLEYAQTSVKHSGGSSGGSSGSETPGTSESATPESSGGSSGGSEPEEERIRYSQRLRGTMRRRYEDDGISDDEIEGKGSKKRRIKQD

SEQ ID NO: 290 - protein, 1787 aa, synthetic construct
MKRTADGSEFESPKKKRKVEASPASGPRHLMDPHIFTSNFNNGIGRHKTYLCYEVERLDNGTSVKMDQHRGFLHNQAKNLLCGFYGRHAELRFLDLVPSLQLDPAQIYRVTWFISWSPCFSWGCAGEVRAFLQENTHVRLRIFAARIYDYDPLYKEALQMLRDAGAQVSIMTYDEFKHCWDTFVDHQGCPFQPWDGLDEHSQALSGRLRAILQNQGNSTSQSDGSSVPADIDQSSDSDQSSSQGQPGSKLEKFTNCYSLSKTLRFKAIPVGKTQENIDNKRLLVEDEKRAEDYKGVKKLLDRYYLSFINDVLHSIKLKNLNNYISLFRKKTRTEKENKELENLEINLRKEIAKAFKGNEGYKSLFKKDIIETILPEFLDDKDEIALVNSFNGFTTAFTGFFDNRENMFSEEAKSTSIAFRCINENLTRYISNMDIFEKVDAIFDKHEVQEIKEKILNSDYDVEDFFEGEFFNFVLTQEGIDVYNAIIGGFVTESGEKIKGLNEYINLYNQKTKQKLPKFKPLYKQVLSDRESLSFYGENQTTQKGQKNSRERMKRIEEGIKELGSQILKEHPVENTQLQNEKLYLYYLQNGRDMYVDQELDINRLSDYDVDHIVPQSFLKDDSIDNKVLTRSDKNRGKSDNVPSEEVVKKMKNYWRQLLNAKLITQRKFDNLTKAERGGLSEGYTSDEEVLEVFRNTLNKNSEIFSSIKKLEKLFKNFDEYSSAGIFVKNGPAISTISKDIFGEWNVIRDKWNAEYDDIHLKKKAVVTEKYEDDRRKSFKKIGSFSLEQLQEYADADLSVVEKLKEIIIQKVDEIYKVYGSSEKLFDADFVLEKSLKKNDAVVAIMKDLLDSVKSFENYIKAFFGEGKETNRDESFYGDFVLAYDILLKVDHIYDAIRNYVTQKPYSKDKFKLYFQNPQFMGGWDKDKETDYRATILRYGSKYYLAIMDKKYAKCLQKIDKDDVNGNYEKINYKLLPGPNKMLPKVFFSKKWMAYYNPSEDIQKIYKNGTFKKGDMFNLNDCHKLIDFFKDSISRYPKWSNAYDFNFSETEKYKDIAGFYREVEEQGYKVSFESASKKEVDKLVEEGKLYMFQIYNKDFSDKSHGTPNLHTMYFKLLFDENNHGQIRLSGGAELFMRRASLKKEELVVHPANSPIANKNPDNPKKTTTLSYDVYKDKRFSEDQYELHIPIAINKCPKNIFKINTEVRVLLKHDDNPYVIGIARGERNLLYIVVVDGKGNIVEQYSLNEIINNFNGIRIKTDYHSLLDKKEKERFEARQNWTSIENIKELKAGYISQVVHKICELVEKYDAVIALEDLNSGFKNSRVKVEKQVYQKFEKMLIDKLNYMVDKKSNPCATGGALKGYQITNKFESFKSMSTQNGFIFYIPAWLTSKIDPSTGFVNLLKTKYTSIADSKKFISSFDRIMYVPEEDLFEFALDYKNFSRTDADYIKKWKLYSYGNRIRIFRNPKKNNVFDWEEVCLTSAYKELFNKYGINYQQGDIRALLCEQSDKAFYSSFMALMSLMLQMRNSITGRTDVDFLISPVKNSDGIFYDSRNYEAQENAILPKNADANGAYNIARKVLWAIGQFKKAEDEKLDKVKIAISNKEWLEYAQTSVKHSGGSGGSGGSTNLSDIIEKETGKQLVIQESILMLPEEVEEVIGNKPESDILVHTAYDESTDENVMLLTSDAPEYKPWALVIQDSNGENKIKMLSGGSKRTADGSEFEGSSGGSSGGGSSGSSGGGSGGSGSGGGSGGSAPPGMRLRSGRSTGAPLTRGSPKKKRKVGSG

SEQ ID NO: 291 - protein, 1802 aa, synthetic construct
MKRTADGSEFESPKKKRKVEASPASGPRHLMDPHIFTSNFNNGIGRHKTYLCYEVERLDNGTSVKMDQHRGFLHNQAKNLLCGFYGRHAELRFLDLVPSLQLDPAQIYRVTWFISWSPCFSWGCAGEVRAFLQENTHVRLRIFAARIYDYDPLYKEALQMLRDAGAQVSIMTYDEFKHCWDTFVDHQGCPFQPWDGLDEHSQALSGRLRAILQNQGNSTSQSDGSSVPADIDQSSDSDQSSSQGQPGSKLEKFTNCYSLSKTLRFKAIPVGKTQENIDNKRLLVEDEKRAEDYKGVKKLLDRYYLSFINDVLHSIKLKNLNNYISLFRKKTRTEKENKELENLEINLRKEIAKAFKGNEGYKSLFKKDIIETILPEFLDDKDEIALVNSFNGFTTAFTGFFDNRENMFSEEAKSTSIAFRCINENLTRYISNMDIFEKVDAIFDKHEVQEIKEKILNSDYDVEDFFEGEFFNFVLTQEGIDVYNAIIGGFVTESGEKIKGLNEYINLYNQKTKQKLPKFKPLYKQVLSDRESLSFYGENQTTQKGQKNSRERMKRIEEGIKELGSQILKEHPVENTQLQNEKLYLYYLQNGRDMYVDQELDINRLSDYDVDHIVPQSFLKDDSIDNKVLTRSDKNRGKSDNVPSEEVVKKMKNYWRQLLNAKLITQRKFDNLTKAERGGLSEGYTSDEEVLEVFRNTLNKNSEIFSSIKKLEKLFKNFDEYSSAGIFVKNGPAISTISKDIFGEWNVIRDKWNAEYDDIHLKKKAVVTEKYEDDRRKSFKKIGSFSLEQLQEYADADLSVVEKLKEIIIQKVDEIYKVYGSSEKLFDADFVLEKSLKKNDAVVAIMKDLLDSVKSFENYIKAFFGEGKETNRDESFYGDFVLAYDILLKVDHIYDAIRNYVTQKPYSKDKFKLYFQNPQFMGGWDKDKETDYRATILRYGSKYYLAIMDKKYAKCLQKIDKDDVNGNYEKINYKLLPGPNKMLPKVFFSKKWMAYYNPSEDIQKIYKNGTFKKGDMFNLNDCHKLIDFFKDSISRYPKWSNAYDFNFSETEKYKDIAGFYREVEEQGYKVSFESASKKEVDKLVEEGKLYMFQIYNKDFSDKSHGTPNLHTMYFKLLFDENNHGQIRLSGGAELFMRRASLKKEELVVHPANSPIANKNPDNPKKTTTLSYDVYKDKRFSEDQYELHIPIAINKCPKNIFKINTEVRVLLKHDDNPYVIGIARGERNLLYIVVVDGKGNIVEQYSLNEIINNFNGIRIKTDYHSLLDKKEKERFEARQNWTSIENIKELKAGYISQVVHKICELVEKYDAVIALEDLNSGFKNSRVKVEKQVYQKFEKMLIDKLNYMVDKKSNPCATGGALKGYQITNKFESFKSMSTQNGFIFYIPAWLTSKIDPSTGFVNLLKTKYTSIADSKKFISSFDRIMYVPEEDLFEFALDYKNFSRTDADYIKKWKLYSYGNRIRIFRNPKKNNVFDWEEVCLTSAYKELFNKYGINYQQGDIRALLCEQSDKAFYSSFMALMSLMLQMRNSITGRTDVDFLISPVKNSDGIFYDSRNYEAQENAILPKNADANGAYNIARKVLWAIGQFKKAEDEKLDKVKIAISNKEWLEYAQTSVKHSGGSGGSGGSTNLSDIIEKETGKQLVIQESILMLPEEVEEVIGNKPESDILVHTAYDESTDENVMLLTSDAPEYKPWALVIQDSNGENKIKMLSGGSKRTADGSEFEGSSGGSSGGGSSGSSGGGSGGSGSGGGSGGSEPEEERIRYSQRLRGTMRRRYEDDGISDDEIEGKGSPKKKRKVGSG

SEQ ID NO: 292 - protein, 1666 aa, synthetic construct
MKRTADGSEFESPKKKRKVAPPGMRLRSGRSTGAPLTRGSGSSGGSSGGGSSGSSGGGSGGSGSGGGSGGSSKLEKFTNCYSLSKTLRFKAIPVGKTQENIDNKRLLVEDEKRAEDYKGVKKLLDRYYLSFINDVLHSIKLKNLNNYISLFRKKTRTEKENKELENLEINLRKEIAKAFKGNEGYKSLFKKDIIETILPEFLDDKDEIALVNSFNGFTTAFTGFFRNRENMFSEEAKSTSIAFRCINENLTRYISNMDIFEKVDAIFDKHEVQEIKEKILNSDYDVEDFFEGEFFNFVLTQEGIDVYNAIIGGFVTESGEKIKGLNEYINLYNQKTKQKLPKFKPLYKQVLSDRESLSFYGEGSSGENQTTQKGQKNSRERMKRIEEGIKELGSQILKEHPVENTQLQNEKLYLYYLQNGRDMYVDQELDINRLSDYDVDHIVPQSFLKDDSIDNKVLTRSDKNRGKSDNVPSEEVVKKMKNYWRQLLNAKLITQRKFDNLTKAERGGLSGYTSDEEVLEVFRNTLNKNSEIFSSIKKLEKLFKNFDEYSSAGIFVKNGPAISTISKDIFGEWNVIRDKWNAEYDDIHLKKKAVVTEKYEDDRRKSFKKIGSFSLEQLQEYADADLSVVEKLKEIIIQKVDEIYKVYGSSEKLFDADFVLEKSLKKNDAVVAIMKDLLDSVKSFENYIKAFFGEGKETNRDESFYGDFVLAYDILLKVDHIYDAIRNYVTQKPYSKDKFKLYFQNPQFMGGWDKDKETDYRATILRYGSKYYLAIMDKKYAKCLQKIDKDDVNGNYEKINYKLLPGPNKMLPKVFFSKKWMAYYNPSEDIQKIYKNGTFKKGDMFNLNDCHKLIDFFKDSISRYPKWSNAYDFNFSETEKYKDIAGFYREVEEQGYKVSFESASKKEVDKLVEEGKLYMFQIYNKDFSDKSHGTPNLHTMYFKLLFDENNHGQIRLSGGAELFMRRASLKKEELVVHPANSPIANKNPDNPKKTTTLSYDVYKDKRFSEDQYELHIPIAINKCPKNIFKINTEVRVLLKHDDNPYVIGIARGERNLLYIVVVDGKGNIVEQYSLNEIINNFNGIRIKTDYHSLLDKKEKERFEARQNWTSIENIKELKAGYISQVVHKICELVEKYDAVIALEDLNSGFKNSRVKVEKQVYQKFEKMLIDKLNYMVDKKSNPCATGGALKGYQITNKFESFKSMSTQNGFIFYIPAWLTSKIDPSTGFVNLLKTKYTSIADSKKFISSFDRIMYVPEEDLFEFALDYKNFSRTDADYIKKWKLYSYGNRIRIFRNPKKNNVFDWEEVCLTSAYKELFNKYGINYQQGDIRALLCEQSDKAFYSSFMALMSLMLQMRNSITGRTDVDFLISPVKNSDGIFYDSRNYEAQENAILPKNADANGAYNIARKVLWAIGQFKKAEDEKLDKVKIAISNKEWLEYAQTSVKHERDKSKSSSKDQQQQDEQQYPPPPPQKDSSSEVEFSHEYWMRHALTLAKRARDEREVPVGAVLVLNNRVIGEGWNRAIGLHDPTAHAEIMALRQGGLVMQNYRLIDATLYVTFEPCVMCAGAMIHSRIGRVVFGVRNSKRGAAGSLMNVLNYPGMNHRVEITEGILADECAALLCDFYRMPRQVFNAQKKAQSSINSGGSKRTADGSEFEPKKKRKVGSG

SEQ ID NO: 293 - DNA, 20 bp, synthetic construct
  source 1..20: mol_type = other DNA
gctccagagccgtgcgaatg

SEQ ID NO: 294 - DNA, 3909 bp, synthetic construct
  source 1..3909: mol_type = other DNA
atggcgggatctaagaagagaagaattaaacaagattcgaagctcgagaagttcaccaactgctactcgctgagcaagacgctgcggttcaaggcgatccccgtcgggaagacccaggagaacatcgacaacaagcggctcctggtcgaggacgagaagcgcgccgaggactacaagggcgtcaagaagctgctggaccggtactacctctccttcatcaacgacgtcctgcactcgatcaagctcaagaacctgaacaactacatctcgctgttccgcaagaagacacggaccgagaaggagaacaaggagctcgagaacctcgagatcaacctgcgcaaggagatcgcgaaggcgttcaagggcaacgaggggtacaagagcctgttcaagaaagacatcatcgagaccatcctgccggagttcctggacgacaaggacgagatcgcgctggtgaactcgttcaacgggttcaccacggccttcaccgggtttttcgacaaccgggagaacatgttcagcgaggaggccaagtcgaccagcatcgccttccggtgcatcaacgagaacctcacccgctacatcagcaacatggacatcttcgagaaggtggacgccatcttcgacaagcacgaggtccaggagatcaaggaaaagatcctgaactcggactacgacgtggaagacttctttgagggcgagttcttcaacttcgtcctcacccaggagggcatcgacgtctacaacgccatcatcggcggcttcgtgacggagagcggcgagaagatcaagggcctcaacgagtacatcaacctctacaaccagaagactaagcagaagctcccgaagttcaagccgctgtacaagcaagtcctgagcgaccgggagtccctctcgttctacggcgagggctacacgagcgacgaggaggtgctggaggtgttccgcaacacgctgaacaagaacagcgagatcttcagctcgatcaagaaactcgagaagctgttcaagaacttcgacgagtacagcagcgccggcatcttcgtcaagaacgggcccgcgatcagcaccatcagcaaggacatcttcggggagtggaacgtgatccgcgacaagtggaacgccgagtacgacgacatccacctcaagaaaaaggcggtggtcacggagaagtacgaggacgaccgccggaagtccttcaagaaaatcgggagcttcagcctcgagcagctccaggagtacgcggacgccgacctgagcgtggtggagaagctcaaggagatcatcatccagaaggtcgacgagatctacaaggtctacggctcgagcgagaagctgttcgacgcggacttcgtgctggagaagtccctcaagaagaacgacgccgtggtggccatcatgaaggatctgctcgacagcgtgaagtcgttcgagaactacatcaaggcattctttggggagggcaaggagacgaaccgggacgagtccttctacggggacttcgtgctcgcgtacgacatcctcctgaaggtcgaccacatctacgacgcgatccggaactacgtcacgcagaagccctacagcaaggacaagttcaagctctacttccagaacccgcagttcatgcgcgggtgggacaaggacaaggagaccgactaccgggccacgatcctgcggtacgggtccaagtactacctcgccatcatggacaagaagtacgccaagtgcctccagaagattgacaaggacgacgtgaacgggaactacgagaagatcaactacaagctcctcccggggcccaacaagatgctgccgagggtgttcttcagcaagaagtggatggcctactacaacccctcggaggacatccagaagatatacaagaacggcacgttcaaaaagggggacatgttcaacctgaacgactgccacaagctgatcgactttttcaaggacagcatcagccgctacccgaagtggtcgaacgcctacgacttcaacttctcggagacggagaagtacaaggacattgcgggcttctaccgggaggtggaggagcagggctacaaggtctccttcgagagcgcctccaagaaagaggtggacaagctcgtggaggagggcaagctgtacatgttccagatctacaacaaggacttctcggacaagtcgcacggcaccccgaacctccacacgatgtacttcaagctgctgttcgacgagaacaaccacgggcagatccgcctcagcggcggggcggagctgttcatgcgccgcgcgtccctcaagaaggaggagctggtcgtgcaccccgccaactccccgatcgcgaacaagaaccccgacaaccccaagaagacaaccaccctctcgtacgacgtctacaaggacaagcggttctcggaggaccagtacgagctgcacatcccgatcgccatcaacaagtgccccaagaacatcttcaagatcaacaccgaggtgcgggtgctgctcaagcacgacgacaacccctacgtcatcgggatcgaccgcggcgagcggaacctgctctacatcgtggtcgtggacgggaaggggaacatcgtggagcagtacagcctgaacgagatcatcaacaacttcaacggcatccgcatcaagacggactaccacagcctcctggacaagaaggagaaggagcggttcgaggcgcggcagaactggacctccatcgagaacatcaaggagctgaaggccggctacatcagccaggtcgtgcacaagatctgcgagctcgtggagaagtacgacgcggtgatcgcgctggaggacttgaacagcgggttcaagaactcccgggtcaaggtcgagaagcaggtctaccagaagttcgagaagatgctgatcgacaagctcaactacatggtggacaagaagtccaacccctgcgccaccggcggcgccctcaagggctaccagatcaccaacaagttcgagtccttcaagtcgatgtctacgcagaacgggttcattttctacatcccggcgtggctcaccagcaagatcgacccgagcacgggcttcgtcaacctcctgaagaccaagtacaccagcatcgcggacagcaagaagttcatctcctcgttcgaccgcatcatgtacgtccccgaggaagacctgttcgagttcgccctcgactacaagaacttctcccggacggacgccgactacatcaaaaagtggaagctctacagctacggcaaccggatccgcatcttccgcaaccccaagaagaacaatgtgttcgactgggaggaggtgtgcctgacgagcgcctacaaggagctcttcaacaagtacggcatcaactaccagcaaggggacatccgcgcgctgctctgcgagcagtccgacaaggcgttctactcgtcgttcatggccctgatgagcctcatgctccagatgcgcaacagcatcaccggccggacggacgtggacttcctgatcagcccggtcaagaacagcgacggcattttctacgacagccggaactacgaggcccaggagaacgccatcctccccaagaacgccgacgcgaacggcgcctacaacatcgcgcggaaggtgctgtgggccatcggccagtttaaaaaggcggaggacgagaagctggacaaggtcaagatcgccatcagcaacaaggagtggctcgagtacgcgcagacgagcgtgaagcactctggaggatctagcggaggatcctctggaagcgagacaccaggcacaagcgagtccgccacaccagagagctccggcggctcctccggaggatccgcgccacctgggatgaggctccgtagcggtagatcaaccggcgctcctttgactagaggttcaggatctaagaagagaagaattaaacaagattga

SEQ ID NO: 295 - DNA, 3948 bp, synthetic construct
  source 1..3948: mol_type = other DNA
atggcgggatctaagaagagaagaattaaacaagattcgaagctcgagaagttcaccaactgctactcgctgagcaagacgctgcggttcaaggcgatccccgtcgggaagacccaggagaacatcgacaacaagcggctcctggtcgaggacgagaagcgcgccgaggactacaagggcgtcaagaagctgctggaccggtactacctctccttcatcaacgacgtcctgcactcgatcaagctcaagaacctgaacaactacatctcgctgttccgcaagaagacacggaccgagaaggagaacaaggagctcgagaacctcgagatcaacctgcgcaaggagatcgcgaaggcgttcaagggcaacgaggggtacaagagcctgttcaagaaagacatcatcgagaccatcctgccggagttcctggacgacaaggacgagatcgcgctggtgaactcgttcaacgggttcaccacggccttcaccgggtttttcgacaaccgggagaacatgttcagcgaggaggccaagtcgaccagcatcgccttccggtgcatcaacgagaacctcacccgctacatcagcaacatggacatcttcgagaaggtggacgccatcttcgacaagcacgaggtccaggagatcaaggaaaagatcctgaactcggactacgacgtggaagacttctttgagggcgagttcttcaacttcgtcctcacccaggagggcatcgacgtctacaacgccatcatcggcggcttcgtgacggagagcggcgagaagatcaagggcctcaacgagtacatcaacctctacaaccagaagactaagcagaagctcccgaagttcaagccgctgtacaagcaagtcctgagcgaccgggagtccctctcgttctacggcgagggctacacgagcgacgaggaggtgctggaggtgttccgcaacacgctgaacaagaacagcgagatcttcagctcgatcaagaaactcgagaagctgttcaagaacttcgacgagtacagcagcgccggcatcttcgtcaagaacgggcccgcgatcagcaccatcagcaaggacatcttcggggagtggaacgtgatccgcgacaagtggaacgccgagtacgacgacatccacctcaagaaaaaggcggtggtcacggagaagtacgaggacgaccgccggaagtccttcaagaaaatcgggagcttcagcctcgagcagctccaggagtacgcggacgccgacctgagcgtggtggagaagctcaaggagatcatcatccagaaggtcgacgagatctacaaggtctacggctcgagcgagaagctgttcgacgcggacttcgtgctggagaagtccctcaagaagaacgacgccgtggtggccatcatgaaggatctgctcgacagcgtgaagtcgttcgagaactacatcaaggcattctttggggagggcaaggagacgaaccgggacgagtccttctacggggacttcgtgctcgcgtacgacatcctcctgaaggtcgaccacatctacgacgcgatccggaactacgtcacgcagaagccctacagcaaggacaagttcaagctctacttccagaacccgcagttcatgcgcgggtgggacaaggacaaggagaccgactaccgggccacgatcctgcggtacgggtccaagtactacctcgccatcatggacaagaagtacgccaagtgcctccagaagattgacaaggacgacgtgaacgggaactacgagaagatcaactacaagctcctcccggggcccaacaagatgctgccgagggtgttcttcagcaagaagtggatggcctactacaacccctcggaggacatccagaagatatacaagaacggcacgttcaaaaagggggacatgttcaacctgaacgactgccacaagctgatcgactttttcaaggacagcatcagccgctacccgaagtggtcgaacgcctacgacttcaacttctcggagacggagaagtacaaggacattgcgggcttctaccgggaggtggaggagcagggctacaaggtctccttcgagagcgcctccaagaaagaggtggacaagctcgtggaggagggcaagctgtacatgttccagatctacaacaaggacttctcggacaagtcgcacggcaccccgaacctccacacgatgtacttcaagctgctgttcgacgagaacaaccacgggcagatccgcctcagcggcggggcggagctgttcatgcgccgcgcgtccctcaagaaggaggagctggtcgtgcaccccgccaactccccgatcgcgaacaagaaccccgacaaccccaagaagacaaccaccctctcgtacgacgtctacaaggacaagcggttctcggaggaccagtacgagctgcacatcccgatcgccatcaacaagtgccccaagaacatcttcaagatcaacaccgaggtgcgggtgctgctcaagcacgacgacaacccctacgtcatcgggatcgaccgcggcgagcggaacctgctctacatcgtggtcgtggacgggaaggggaacatcgtggagcagtacagcctgaacgagatcatcaacaacttcaacggcatccgcatcaagacggactaccacagcctcctggacaagaaggagaaggagcggttcgaggcgcggcagaactggacctccatcgagaacatcaaggagctgaaggccggctacatcagccaggtcgtgcacaagatctgcgagctcgtggagaagtacgacgcggtgatcgcgctggaggacttgaacagcgggttcaagaactcccgggtcaaggtcgagaagcaggtctaccagaagttcgagaagatgctgatcgacaagctcaactacatggtggacaagaagtccaacccctgcgccaccggcggcgccctcaagggctaccagatcaccaacaagttcgagtccttcaagtcgatgtctacgcagaacgggttcattttctacatcccggcgtggctcaccagcaagatcgacccgagcacgggcttcgtcaacctcctgaagaccaagtacaccagcatcgcggacagcaagaagttcatctcctcgttcgaccgcatcatgtacgtccccgaggaagacctgttcgagttcgccctcgactacaagaacttctcccggacggacgccgactacatcaaaaagtggaagctctacagctacggcaaccggatccgcatcttccgcaaccccaagaagaacaatgtgttcgactgggaggaggtgtgcctgacgagcgcctacaaggagctcttcaacaagtacggcatcaactaccagcaaggggacatccgcgcgctgctctgcgagcagtccgacaaggcgttctactcgtcgttcatggccctgatgagcctcatgctccagatgcgcaacagcatcaccggccggacggacgtggacttcctgatcagcccggtcaagaacagcgacggcattttctacgacagccggaactacgaggcccaggagaacgccatcctccccaagaacgccgacgcgaacggcgcctacaacatcgcgcggaaggtgctgtgggccatcggccagtttaaaaaggcggaggacgagaagctggacaaggtcaagatcgccatcagcaacaaggagtggctcgagtacgcgcagacgagcgtgaagcactctggaggatctagcggaggatcctctggaagcgagacaccaggcacaagcgagtccgccacaccagagagctccggcggctcctccggaggatccgaacccgaggaggagcgtatccgctactcgcaacggttacgcgggactatgagaaggagatacgaggacgacggcatctccgacgacgagatcgaggggaagggatctaagaagagaagaattaaacaagattga

SEQ ID NO: 296 - DNA, 5494 bp, synthetic construct
  source 1..5494: mol_type = other DNA
atgaaacggacagccgacggaagcgagttcgagtcaccaaagaagaagcggaaagtcgaggcctcccccgcatcaggacctagacacctgatggatccccatattttcacatctaacttcaacaacggaatcggcagacacaagacctacctgtgctatgaggtggaaaggctggataacggaacctctgtgaagatggaccagcacaggtaagtatcaaggttacaagacaggtttaaggagaccaatagaaactgggcttgtcgagacagagaagactcttgcgtttctgataggcacctattggtcttactgacatccactttgcctttctctccacaggggcttcctgcataaccaggccaagaatctgctgtgcggtttctacgggagacatgcagaactgaggtttctggatctggtgccatccctgcagctggaccccgctcagatctacagagtgacttggttcatctcttggagcccttgcttttcatggggatgtgctggcgaggtgagggccttccttcaggaaaacacacacgtgagactgaggatttttgctgccagaatctacgattatgacccactgtacaaggaagctctgcagatgctgagggatgcaggcgctcaggtgagcattatgacctatgacgagttcaagcactgctgggatacttttgtggaccatcagggttgtccttttcagccatgggatgggctggacgagcattctcaggcactgagcggtagactgagggctatcctgcagaaccaggggaactctacttctcaatctgatggatcttctgttccagctgatattgatcaatcttctgattctgatcaatcttcttctcaaggacaaccaggatccaagctggagaagtttacaaactgttacagcctctccaaaaccctcaggtttaaagcgatcccggtgggcaagacccaggagaacatcgacaacaagaggctcctggtggaagacgagaagcgcgccgaagactacaagggcgtgaagaagctgctcgataggtactacctcagctttattaacgacgtgctgcacagcatcaaactcaagaatctcaacaactacatctccctcttccgcaaaaagacccgcaccgagaaggagaacaaggagctggagaacctggagatcaacctccgcaaggaaatcgccaaagcgttcaagggcaatgaagggtacaagagcctcttcaagaaagacatcatcgaaactatcctcccagagtttctcgatgacaaggacgagatcgcgctggtgaactcctttaacgggttcacaaccgcgtttaccggcttctttgataacagggaaaatatgttctccgaggaggccaagtccaccagcatcgccttcaggtgtatcaacgagaacctcacccgctacatttccaatatggacattttcgagaaggtggatgcgatcttcgataagcacgaggtgcaggagatcaaagagaagattctcaattccgattatgacgtcgaggatttcttcgaaggggagttctttaattttgtgctcacacaagagggcattgacgtgtacaacgcgattatcgggggcttcgtcacagagtccggggagaagattaaggggctgaatgagtacatcaatctgtacaatcagaagaccaagcagaaactgccgaaattcaagccgctctacaagcaagtcctgtccgatagggaaagcctctccttctacggcgagaaccagaccacccagaagggacagaagaacagccgcgagagaatgaagcggatcgaagagggcatcaaagagctgggcagccagatcctgaaagaacaccccgtggaaaacacccagctgcagaacgagaagctgtacctgtactacctgcagaatgggcgggatatgtacgtggaccaggaactggacatcaaccggctgtccgactacgatgtggaccatatcgtgcctcagagctttctgaaggacgactccatcgacaacaaggtgctgaccagaagcgacaagaaccggggcaagagcgacaacgtgccctccgaagaggtcgtgaagaagatgaagaactactggcggcagctgctgaacgccaagctgattacccagagaaagttcgacaatctgaccaaggccgagagaggcggcctgagcgagggctataccagcgacgaggaggtgctggaagtcttccgcaacacactgaataagaatagcgagattttctcctccatcaagaagctcgagaagctctttaagaactttgacgagtacagctccgccgggattttcgtgaagaacgggccggcgatcagcaccatctccaaggacatctttggcgagtggaacgtcatcagggacaagtggaacgccgagtacgacgacatccacctgaagaagaaggcggtggtgaccgagaagtatgaggacgatcgcaggaagtccttcaaaaaaatcggctccttcagcctcgaacagctccaggagtatgccgatgcggatctgtccgtcgtcgagaagctgaaggaaatcatcattcagaaggtcgacgagatctataaagtgtacgggtccagcgagaagctgttcgacgccgactttgtgctcgagaagtccctcaaaaagaatgacgccgtggtggccattatgaaagacctgctcgactccgtgaagtccttcgaaaattacattaaagcgttctttggggaggggaaggaaactaacagggatgagtccttctatggcgactttgtcctcgcgtacgacatcctgctgaaggtcgaccacatttacgacgcgatccgcaactacgtgacacagaagccgtactccaaagacaagttcaagctgtacttccagaacccgcaatttatggggggctgggacaaggataaagagacagactaccgcgcgacaattctccgctatggctccaaatactatctggccatcatggacaagaagtacgcgaagtgcctgcagaagatcgacaaagacgacgtcaatggcaactatgaaaagatcaactacaagctgctgccgggcccgaacaagatgctcccgaaggtgttcttcagcaagaagtggatggcctactacaatccaagcgaggatattcagaaaatctataaaaacgggaccttcaagaagggggacatgtttaacctcaacgactgccacaagctcattgatttcttcaaggatagcatttcccgctacccgaaatggtccaatgcgtacgattttaacttctccgagacagaaaagtacaaagacatcgcgggcttttacagggaggtggaggagcaagggtataaagtttcttttgaatccgcgagcaagaaggaagtcgacaagctcgtcgaggagggcaagctctacatgttccaaatttataacaaggacttttccgacaagagccatgggaccccaaacctccacaccatgtacttcaaactgctctttgacgagaacaaccacgggcaaatcaggctgagcggcggcgccgaattattcatgcgcagggcctccctcaagaaggaggagctggtcgtccatccagccaattccccgatcgcgaacaagaacccggacaatccgaaaaagaccaccaccctgtcctacgacgtctacaaggacaaacgcttcagcgaagaccagtacgaattacacatcccaattgcgattaataagtgcccaaagaatatcttcaaaattaatacagaggtcagggtgctgctcaaacacgacgacaatccgtatgtcatcggcattgccaggggcgagcgcaatctgctctatatcgtggtcgtggatgggaagggcaatattgtggagcagtactccctgaacgagattatcaacaacttcaatgggattaggattaagaccgactatcacagcctgctcgacaagaaagaaaaagagaggtttgaggcccgccaaaactggacctccattgagaatatcaaagaattaaaggccggctatatttcccaagtcgtccacaagatctgcgagctggtggagaaatatgacgccgtgattgcgctcgaagacttaaattctgggttcaagaactcccgcgtgaaggtggaaaaacaggtgtatcagaaattcgagaaaatgctgatcgacaaactcaattatatggtggataagaagtccaacccgtgtgccacagggggcgcgctgaagggctatcagatcaccaacaagttcgagagcttcaagagcatgagcacccagaacgggtttattttctacatcccggcgtggctcacctccaagattgacccgagcaccggcttcgtgaacctcctgaagacaaagtatacctccattgccgacagcaagaagtttatctcctccttcgaccgcattatgtatgtgccggaggaggacctcttcgagttcgccctcgactacaaaaacttcagccgcacagatgcggattacatcaagaagtggaagctgtactcctacgggaacaggatccgcatcttcaggaatccaaaaaaaaataacgtctttgactgggaggaagtgtgcctgacatccgcctacaaggaactgttcaataaatacggcatcaattaccagcagggcgacattcgcgccctcctctgtgagcagtccgacaaagcgttttactccagcttcatggccctcatgtccctgatgctccaaatgaggaatagcatcacagggcgcaccgacgtcgacttcctcatcagcccggtgaagaactccgacgggatcttttacgactcccgcaactatgaggcgcaagagaatgcgatcctcccgaagaacgccgatgcgaacggggcctataatatcgccaggaaagtgctctgggccatcgggcagttcaaaaaggcggaggatgagaagctcgacaaggtgaaaattgccatttccaacaaggagtggctggagtacgcgcagacctccgtgaagcactcaggcggaagtggtggaagtggcggtagtaccaacctcagcgacattatcgagaaggaaaccggcaagcaactcgtgatccaggagagcatactgatgctccccgaggaggtcgaggaggtgattggcaataagcccgagtccgatatactggttcatactgcgtatgacgaaagcacagacgagaacgtcatgctacttaccagcgacgccccggagtacaagccctgggccctagtcatccaagacagcaacggtgagaacaagatcaagatgctttctggcggctcaaaaagaaccgccgacggcagcgaattcgagggtagttccggcgggtcaagtgggggaggctccagtgggagtagcggaggtggaagtggtggctctggttctggtgggggcagtggggggtccgccccgcctggaatgaggttgcgctctggcagatccacaggtgccccccttacgcgaggaagccccaagaagaagaggaaagtcggaagcgga

SEQ ID NO: 297 - DNA, 5539 bp, synthetic construct
  source 1..5539: mol_type = other DNA
atgaaacggacagccgacggaagcgagttcgagtcaccaaagaagaagcggaaagtcgaggcctcccccgcatcaggacctagacacctgatggatccccatattttcacatctaacttcaacaacggaatcggcagacacaagacctacctgtgctatgaggtggaaaggctggataacggaacctctgtgaagatggaccagcacaggtaagtatcaaggttacaagacaggtttaaggagaccaatagaaactgggcttgtcgagacagagaagactcttgcgtttctgataggcacctattggtcttactgacatccactttgcctttctctccacaggggcttcctgcataaccaggccaagaatctgctgtgcggtttctacgggagacatgcagaactgaggtttctggatctggtgccatccctgcagctggaccccgctcagatctacagagtgacttggttcatctcttggagcccttgcttttcatggggatgtgctggcgaggtgagggccttccttcaggaaaacacacacgtgagactgaggatttttgctgccagaatctacgattatgacccactgtacaaggaagctctgcagatgctgagggatgcaggcgctcaggtgagcattatgacctatgacgagttcaagcactgctgggatacttttgtggaccatcagggttgtccttttcagccatgggatgggctggacgagcattctcaggcactgagcggtagactgagggctatcctgcagaaccaggggaactctacttctcaatctgatggatcttctgttccagctgatattgatcaatcttctgattctgatcaatcttcttctcaaggacaaccaggatccaagctggagaagtttacaaactgttacagcctctccaaaaccctcaggtttaaagcgatcccggtgggcaagacccaggagaacatcgacaacaagaggctcctggtggaagacgagaagcgcgccgaagactacaagggcgtgaagaagctgctcgataggtactacctcagctttattaacgacgtgctgcacagcatcaaactcaagaatctcaacaactacatctccctcttccgcaaaaagacccgcaccgagaaggagaacaaggagctggagaacctggagatcaacctccgcaaggaaatcgccaaagcgttcaagggcaatgaagggtacaagagcctcttcaagaaagacatcatcgaaactatcctcccagagtttctcgatgacaaggacgagatcgcgctggtgaactcctttaacgggttcacaaccgcgtttaccggcttctttgataacagggaaaatatgttctccgaggaggccaagtccaccagcatcgccttcaggtgtatcaacgagaacctcacccgctacatttccaatatggacattttcgagaaggtggatgcgatcttcgataagcacgaggtgcaggagatcaaagagaagattctcaattccgattatgacgtcgaggatttcttcgaaggggagttctttaattttgtgctcacacaagagggcattgacgtgtacaacgcgattatcgggggcttcgtcacagagtccggggagaagattaaggggctgaatgagtacatcaatctgtacaatcagaagaccaagcagaaactgccgaaattcaagccgctctacaagcaagtcctgtccgatagggaaagcctctccttctacggcgagaaccagaccacccagaagggacagaagaacagccgcgagagaatgaagcggatcgaagagggcatcaaagagctgggcagccagatcctgaaagaacaccccgtggaaaacacccagctgcagaacgagaagctgtacctgtactacctgcagaatgggcgggatatgtacgtggaccaggaactggacatcaaccggctgtccgactacgatgtggaccatatcgtgcctcagagctttctgaaggacgactccatcgacaacaaggtgctgaccagaagcgacaagaaccggggcaagagcgacaacgtgccctccgaagaggtcgtgaagaagatgaagaactactggcggcagctgctgaacgccaagctgattacccagagaaagttcgacaatctgaccaaggccgagagaggcggcctgagcgagggctataccagcgacgaggaggtgctggaagtcttccgcaacacactgaataagaatagcgagattttctcctccatcaagaagctcgagaagctctttaagaactttgacgagtacagctccgccgggattttcgtgaagaacgggccggcgatcagcaccatctccaaggacatctttggcgagtggaacgtcatcagggacaagtggaacgccgagtacgacgacatccacctgaagaagaaggcggtggtgaccgagaagtatgaggacgatcgcaggaagtccttcaaaaaaatcggctccttcagcctcgaacagctccaggagtatgccgatgcggatctgtccgtcgtcgagaagctgaaggaaatcatcattcagaaggtcgacgagatctataaagtgtacgggtccagcgagaagctgttcgacgccgactttgtgctcgagaagtccctcaaaaagaatgacgccgtggtggccattatgaaagacctgctcgactccgtgaagtccttcgaaaattacattaaagcgttctttggggaggggaaggaaactaacagggatgagtccttctatggcgactttgtcctcgcgtacgacatcctgctgaaggtcgaccacatttacgacgcgatccgcaactacgtgacacagaagccgtactccaaagacaagttcaagctgtacttccagaacccgcaatttatggggggctgggacaaggataaagagacagactaccgcgcgacaattctccgctatggctccaaatactatctggccatcatggacaagaagtacgcgaagtgcctgcagaagatcgacaaagacgacgtcaatggcaactatgaaaagatcaactacaagctgctgccgggcccgaacaagatgctcccgaaggtgttcttcagcaagaagtggatggcctactacaatccaagcgaggatattcagaaaatctataaaaacgggaccttcaagaagggggacatgtttaacctcaacgactgccacaagctcattgatttcttcaaggatagcatttcccgctacccgaaatggtccaatgcgtacgattttaacttctccgagacagaaaagtacaaagacatcgcgggcttttacagggaggtggaggagcaagggtataaagtttcttttgaatccgcgagcaagaaggaagtcgacaagctcgtcgaggagggcaagctctacatgttccaaatttataacaaggacttttccgacaagagccatgggaccccaaacctccacaccatgtacttcaaactgctctttgacgagaacaaccacgggcaaatcaggctgagcggcggcgccgaattattcatgcgcagggcctccctcaagaaggaggagctggtcgtccatccagccaattccccgatcgcgaacaagaacccggacaatccgaaaaagaccaccaccctgtcctacgacgtctacaaggacaaacgcttcagcgaagaccagtacgaattacacatcccaattgcgattaataagtgcccaaagaatatcttcaaaattaatacagaggtcagggtgctgctcaaacacgacgacaatccgtatgtcatcggcattgccaggggcgagcgcaatctgctctatatcgtggtcgtggatgggaagggcaatattgtggagcagtactccctgaacgagattatcaacaacttcaatgggattaggattaagaccgactatcacagcctgctcgacaagaaagaaaaagagaggtttgaggcccgccaaaactggacctccattgagaatatcaaagaattaaaggccggctatatttcccaagtcgtccacaagatctgcgagctggtggagaaatatgacgccgtgattgcgctcgaagacttaaattctgggttcaagaactcccgcgtgaaggtggaaaaacaggtgtatcagaaattcgagaaaatgctgatcgacaaactcaattatatggtggataagaagtccaacccgtgtgccacagggggcgcgctgaagggctatcagatcaccaacaagttcgagagcttcaagagcatgagcacccagaacgggtttattttctacatcccggcgtggctcacctccaagattgacccgagcaccggcttcgtgaacctcctgaagacaaagtatacctccattgccgacagcaagaagtttatctcctccttcgaccgcattatgtatgtgccggaggaggacctcttcgagttcgccctcgactacaaaaacttcagccgcacagatgcggattacatcaagaagtggaagctgtactcctacgggaacaggatccgcatcttcaggaatccaaaaaaaaataacgtctttgactgggaggaagtgtgcctgacatccgcctacaaggaactgttcaataaatacggcatcaattaccagcagggcgacattcgcgccctcctctgtgagcagtccgacaaagcgttttactccagcttcatggccctcatgtccctgatgctccaaatgaggaatagcatcacagggcgcaccgacgtcgacttcctcatcagcccggtgaagaactccgacgggatcttttacgactcccgcaactatgaggcgcaagagaatgcgatcctcccgaagaacgccgatgcgaacggggcctataatatcgccaggaaagtgctctgggccatcgggcagttcaaaaaggcggaggatgagaagctcgacaaggtgaaaattgccatttccaacaaggagtggctggagtacgcgcagacctccgtgaagcactcaggcggaagtggtggaagtggcggtagtaccaacctcagcgacattatcgagaaggaaaccggcaagcaactcgtgatccaggagagcatactgatgctccccgaggaggtcgaggaggtgattggcaataagcccgagtccgatatactggttcatactgcgtatgacgaaagcacagacgagaacgtcatgctacttaccagcgacgccccggagtacaagccctgggccctagtcatccaagacagcaacggtgagaacaagatcaagatgctttctggcggctcaaaaagaaccgccgacggcagcgaattcgagggtagttccggcgggtcaagtgggggaggctccagtgggagtagcggaggtggaagtggtggctctggttctggtgggggcagtggggggtccgaacccgaagaggagagaatacggtactcacaaagactccgcgggacaatgcgcaggagatacgaggatgacgggatatccgacgatgagatcgagggcaagggaagtcccaagaagaagaggaaagtcggaagcgga

SEQ ID NO: 298 - DNA, 4998 bp, synthetic construct
  source 1..4998: mol_type = other DNA
atgaaaagaactgctgatggatctgagtttgaatcacctaagaagaaaaggaaggttgcaccacctggaatgaggcttcgttctgggagatcaactggtgctcccttgacacgaggcagtggttcttctggaggaagcagcggtggtggatcatctggttcatcaggagggggctcggggggaagtggcagtggaggtgggtccggtggctcctcgaagctggaaaagttcaccaactgctactcgctgagcaagacgctgcgcttcaaggcaatccctgtcggcaagacccaggagaacatcgacaacaagcggctgctggtcgaggacgagaagcgagccgaggactacaagggcgtcaagaagttgctcgaccggtactacctcagcttcatcaacgacgtcctgcacagcatcaagctcaagaatctgaacaactacatctccctcttccgcaagaaaacgaggaccgagaaggagaacaaggagctggagaacctggagatcaacctccggaaggagatcgcaaaggcgttcaagggcaacgaggggtacaagtccctattcaagaaggacatcatcgagaccatcctacccgagttcctggacgacaaggacgagatcgcactcgtcaactctttcaacggcttcaccaccgccttcaccgggttcttccggaaccgggagaatatgtttagtgaggaggccaagagtacctccatcgcgttccgctgcatcaacgagaacctgacccgctacatctcgaacatggacatcttcgagaaggtggacgccatcttcgacaagcacgaggtccaggagatcaaggagaaaatcctgaacagcgactacgacgtggaggacttcttcgagggcgagttcttcaacttcgtgcttacgcaagagggcatcgacgtttacaacgccatcatcggagggttcgttacggagtctggcgagaagatcaagggcctgaacgagtacatcaacctgtacaaccagaaaacgaagcaaaagctgcccaagttcaagcccctgtacaagcaagtcctgtccgaccgcgagagcctgagcttctacggggagggcagttctggagagaatcaaacaactcagaaaggacagaagaattcaagggaaagaatgaagagaattgaagaggggataaaagaacttggttctcaaatcttgaaggagcaccccgttgaaaacactcaattgcagaatgagaagctttacctatactatctgcaaaatggaagggacatgtatgtcgaccaagaattggatatcaaccgactttctgattatgatgttgatcatattgtgccacagagcttcttaaaagatgattcaattgataacaaggtattaacgcgtagtgacaagaaccgcgggaaatcagacaatgttccttccgaagaagttgtgaagaaaatgaaaaattattggagacaacttctcaatgcaaagttgataacacagcggaaatttgataacctgaccaaagctgagaggggtggtctctccggctacacctccgacgaggaggtgctggaggtgttccgaaacaccctcaacaagaacagcgagatattcagtagcatcaagaagttggagaagctgttcaagaacttcgacgagtattcctcggcgggcatcttcgtcaagaacggcccggccatatctacgatcagcaaggacatcttcggcgagtggaacgtgatccgcgacaagtggaacgccgagtacgacgacatccaccttaagaagaaggccgtcgtgaccgagaagtacgaggacgaccggcgcaagagcttcaagaaaatcggcagcttcagcctggagcagctccaggagtacgccgacgcggacctgagcgtcgtggagaagttaaaggagatcatcatccagaaggttgacgaaatctacaaggtgtacggctccagcgagaagctgttcgacgcggacttcgtgttggagaaatccctcaagaagaacgacgccgtggtggcgatcatgaaggatctgctggactcggttaagtccttcgagaactacatcaaggcgttcttcggggagggcaaggagaccaaccgggacgagtcgttctatggggacttcgttctggcgtacgacatcctgctcaaggtggaccacatctacgacgccatcaggaactacgtgacccagaagccctactcaaaggacaagttcaagctctacttccagaaccctcagttcatgggcggttgggacaaggataaggagaccgactaccgggccacgatcctgcgctacggctcgaagtattacctggccatcatggacaagaagtatgccaagtgcctccagaaaatcgacaaggacgacgtgaacgggaactacgagaagattaactacaaactgctgccgggcccgaacaagatgcttccgaaggtgttcttcagcaagaagtggatggcgtactacaaccccagcgaggacatccagaaaatctacaagaacggcacgttcaagaagggagatatgttcaacctgaacgactgccataagctcatcgacttcttcaaggactcgatcagccgttaccccaagtggtccaacgcctacgacttcaacttcagcgagaccgagaagtacaaggatatagcgggcttctaccgggaggtcgaggagcaagggtacaaggtttccttcgaaagcgcgtccaagaaggaggtggataagctcgtggaggagggcaagctctatatgttccagatatacaacaaggacttctccgacaagtcacacgggacgccgaacctccacaccatgtacttcaagctcctcttcgatgagaacaaccacggccagattcgcctgtctggaggggcggagctgttcatgcgccgcgcctcgctcaagaaggaggagctggtcgtccacccggccaactcacccatcgccaacaagaaccccgacaaccccaagaaaaccaccaccttgtcttacgatgtgtacaaggacaagcgcttctccgaggaccagtacgaactccacatccccatcgctatcaacaagtgccccaagaacatcttcaagattaacaccgaggtgcgcgtgctcctcaagcacgacgacaacccctacgtgatcggcatcgcgcgcggcgagcgcaacctcctgtacatcgtggtcgtggacggcaagggcaacatcgtcgagcagtattccctgaacgagatcatcaacaacttcaacgggattcgtatcaagacggactaccactcgctgctggacaagaaggagaaggagcggttcgaggcccgtcaaaactggaccagcatcgagaacatcaaggagctgaaagcgggctacatcagccaagtcgtgcacaagatttgcgagcttgtggagaagtacgatgccgtcatagccctggaggatctgaacagcgggttcaagaacagccgagtgaaggtggagaagcaagtctatcagaagttcgagaaaatgctcatcgacaagctcaactacatggtcgataagaagtcaaacccgtgcgccacgggcggggcgctcaagggctaccagatcacgaacaagttcgagagcttcaagtccatgtccacccagaacggcttcatattctacatccccgcctggctaacgagcaagatcgaccccagcaccggcttcgtgaacctgctcaagacgaagtacaccagcatcgccgactccaagaagttcatctcgtcattcgaccggataatgtacgtgcccgaggaggatctgttcgagttcgccctggactacaagaacttctctaggaccgacgccgattacatcaagaagtggaagctctactcttacggcaaccgcatccgcatcttccggaaccccaagaagaacaatgtgttcgactgggaggaggtctgcctgacctccgcgtacaaggagctgttcaacaagtacggcatcaactaccagcaaggggacatccgggccctgctgtgcgagcagtccgacaaagccttctacagcagcttcatggcccttatgtcgctgatgctccagatgaggaactccatcacggggcgcaccgacgtcgatttcctcattagcccggtcaagaactccgacgggatattctacgactcccgcaactacgaggcccaggagaacgccattctgcccaagaacgcggacgcgaacggcgcgtacaacatcgcccggaaggtgctgtgggccatcgggcagttcaagaaggcggaggacgagaagctggataaggtcaagatcgccatcagcaacaaggagtggttggagtacgcccagacgagcgtgaagcacgagagagacaaatcaaagagtagctccaaagatcaacagcagcaagatgaacaacaatatcctcctccaccaccccagaaggattcttcttctgaggttgaattttcacatgagtattggatgagacacgctcttaccttggctaagagagcaagggatgagagagaagttccagtgggagcagttcttgtgttgaacaatagagttattggagagggttggaacagggctattggacttcatgatcctactgctcacgcagaaattatggcacttagacaaggtggacttgttatgcagaactacaggcttatcgatgctactctttatgttacattcgagccatgtgtgatgtgcgctggagcaatgattcattctaggattggaagggttgtgttcggtgttagaaactctaagaggggagctgcaggttcacttatgaacgttttgaattatcctggtatgaaccacagagtggagattactgaaggtattttggcagatgaatgtgctgcacttttgtgcgatttttacagaatgcctagacaagtgttcaacgctcaaaagaaggcacaatcttctattaactctggtgggtcaaaaagaactgctgatggaagtgaatttgagcctaagaagaaaaggaaggttggcagtggc

SEQ ID NO: 299 - protein, 1227 aa, synthetic construct
SKLEKFTNCYSLSKTLRFKAIPVGKTQENIDNKRLLVEDEKRAEDYKGVKKLLDRYYLSFINDVLHSIKLKNLNNYISLFRKKTRTEKENKELENLEINLRKEIAKAFKGNEGYKSLFKKDIIETILPEFLDDKDEIALVNSFNGFTTAFTGFFDNRENMFSEEAKSTSIAFRCINENLTRYISNMDIFEKVDAIFDKHEVQEIKEKILNSDYDVEDFFEGEFFNFVLTQEGIDVYNAIIGGFVTESGEKIKGLNEYINLYNQKTKQKLPKFKPLYKQVLSDRESLSFYGEGYTSDEEVLEVFRNTLNKNSEIFSSIKKLEKLFKNFDEYSSAGIFVKNGPAISTISKDIFGEWNVIRDKWNAEYDDIHLKKKAVVTEKYEDDRRKSFKKIGSFSLEQLQEYADADLSVVEKLKEIIIQKVDEIYKVYGSSEKLFDADFVLEKSLKKNDAVVAIMKDLLDSVKSFENYIKAFFGEGKETNRDESFYGDFVLAYDILLKVDHIYDAIRNYVTQKPYSKDKFKLYFQNPQFMRGWDKDKETDYRATILRYGSKYYLAIMDKKYAKCLQKIDKDDVNGNYEKINYKLLPGPNKMLPRVFFSKKWMAYYNPSEDIQKIYKNGTFKKGDMFNLNDCHKLIDFFKDSISRYPKWSNAYDFNFSETEKYKDIAGFYREVEEQGYKVSFESASKKEVDKLVEEGKLYMFQIYNKDFSDKSHGTPNLHTMYFKLLFDENNHGQIRLSGGAELFMRRASLKKEELVVHPANSPIANKNPDNPKKTTTLSYDVYKDKRFSEDQYELHIPIAINKCPKNIFKINTEVRVLLKHDDNPYVIGIDRGERNLLYIVVVDGKGNIVEQYSLNEIINNFNGIRIKTDYHSLLDKKEKERFEARQNWTSIENIKELKAGYISQVVHKICELVEKYDAVIALEDLNSGFKNSRVKVEKQVYQKFEKMLIDKLNYMVDKKSNPCATGGALKGYQITNKFESFKSMSTQNGFIFYIPAWLTSKIDPSTGFVNLLKTKYTSIADSKKFISSFDRIMYVPEEDLFEFALDYKNFSRTDADYIKKWKLYSYGNRIRIFRNPKKNNVFDWEEVCLTSAYKELFNKYGINYQQGDIRALLCEQSDKAFYSSFMALMSLMLQMRNSITGRTDVDFLISPVKNSDGIFYDSRNYEAQENAILPKNADANGAYNIARKVLWAIGQFKKAEDEKLDKVKIAISNKEWLEYAQTSVKH

SEQ ID NO: 300 - protein, 1227 aa, synthetic construct
SKLEKFTNCYSLSKTLRFKAIPVGKTQENIDNKRLLVEDEKRAEDYKGVKKLLDRYYLSFINDVLHSIKLKNLNNYISLFRKKTRTEKENKELENLEINLRKEIAKAFKGNEGYKSLFKKDIIETILPEFLDDKDEIALVNSFNGFTTAFTGFFDNRENMFSEEAKSTSIAFRCINENLTRYISNMDIFEKVDAIFDKHEVQEIKEKILNSDYDVEDFFEGEFFNFVLTQEGIDVYNAIIGGFVTESGEKIKGLNEYINLYNQKTKQKLPKFKPLYKQVLSDRESLSFYGEGYTSDEEVLEVFRNTLNKNSEIFSSIKKLEKLFKNFDEYSSAGIFVKNGPAISTISKDIFGEWNVIRDKWNAEYDDIHLKKKAVVTEKYEDDRRKSFKKIGSFSLEQLQEYADADLSVVEKLKEIIIQKVDEIYKVYGSSEKLFDADFVLEKSLKKNDAVVAIMKDLLDSVKSFENYIKAFFGEGKETNRDESFYGDFVLAYDILLKVDHIYDAIRNYVTQKPYSKDKFKLYFQNPQFMRGWDKDVETDRRATILRYGSKYYLAIMDKKYAKCLQKIDKDDVNGNYEKINYKLLPGPNKMLPKVFFSKKWMAYYNPSEDIQKIYKNGTFKKGDMFNLNDCHKLIDFFKDSISRYPKWSNAYDFNFSETEKYKDIAGFYREVEEQGYKVSFESASKKEVDKLVEEGKLYMFQIYNKDFSDKSHGTPNLHTMYFKLLFDENNHGQIRLSGGAELFMRRASLKKEELVVHPANSPIANKNPDNPKKTTTLSYDVYKDKRFSEDQYELHIPIAINKCPKNIFKINTEVRVLLKHDDNPYVIGIDRGERNLLYIVVVDGKGNIVEQYSLNEIINNFNGIRIKTDYHSLLDKKEKERFEARQNWTSIENIKELKAGYISQVVHKICELVEKYDAVIALEDLNSGFKNSRVKVEKQVYQKFEKMLIDKLNYMVDKKSNPCATGGALKGYQITNKFESFKSMSTQNGFIFYIPAWLTSKIDPSTGFVNLLKTKYTSIADSKKFISSFDRIMYVPEEDLFEFALDYKNFSRTDADYIKKWKLYSYGNRIRIFRNPKKNNVFDWEEVCLTSAYKELFNKYGINYQQGDIRALLCEQSDKAFYSSFMALMSLMLQMRNSITGRTDVDFLISPVKNSDGIFYDSRNYEAQENAILPKNADANGAYNIARKVLWAIGQFKKAEDEKLDKVKIAISNKEWLEYAQTSVKH

SEQ ID NO: 301 - protein, 1249 aa, synthetic construct
MAGSKKRRIKQDSKLEKFTNCYSLSKTLRFKAIPVGKTQENIDNKRLLVEDEKRAEDYKGVKKLLDRYYLSFINDVLHSIKLKNLNNYISLFRKKTRTEKENKELENLEINLRKEIAKAFKGNEGYKSLFKKDIIETILPEFLDDKDEIALVNSFNGFTTAFTGFFDNRENMFSEEAKSTSIAFRCINENLTRYISNMDIFEKVDAIFDKHEVQEIKEKILNSDYDVEDFFEGEFFNFVLTQEGIDVYNAIIGGFVTESGEKIKGLNEYINLYNQKTKQKLPKFKPLYKQVLSDRESLSFYGEGYTSDEEVLEVFRNTLNKNSEIFSSIKKLEKLFKNFDEYSSAGIFVKNGPAISTISKDIFGEWNVIRDKWNAEYDDIHLKKKAVVTEKYEDDRRKSFKKIGSFSLEQLQEYADADLSVVEKLKEIIIQKVDEIYKVYGSSEKLFDADFVLEKSLKKNDAVVAIMKDLLDSVKSFENYIKAFFGEGKETNRDESFYGDFVLAYDILLKVDHIYDAIRNYVTQKPYSKDKFKLYFQNPQFMRGWDKDKETDYRATILRYGSKYYLAIMDKKYAKCLQKIDKDDVNGNYEKINYKLLPGPNKMLPRVFFSKKWMAYYNPSEDIQKIYKNGTFKKGDMFNLNDCHKLIDFFKDSISRYPKWSNAYDFNFSETEKYKDIAGFYREVEEQGYKVSFESASKKEVDKLVEEGKLYMFQIYNKDFSDKSHGTPNLHTMYFKLLFDENNHGQIRLSGGAELFMRRASLKKEELVVHPANSPIANKNPDNPKKTTTLSYDVYKDKRFSEDQYELHIPIAINKCPKNIFKINTEVRVLLKHDDNPYVIGIDRGERNLLYIVVVDGKGNIVEQYSLNEIINNFNGIRIKTDYHSLLDKKEKERFEARQNWTSIENIKELKAGYISQVVHKICELVEKYDAVIALEDLNSGFKNSRVKVEKQVYQKFEKMLIDKLNYMVDKKSNPCATGGALKGYQITNKFESFKSMSTQNGFIFYIPAWLTSKIDPSTGFVNLLKTKYTSIADSKKFISSFDRIMYVPEEDLFEFALDYKNFSRTDADYIKKWKLYSYGNRIRIFRNPKKNNVFDWEEVCLTSAYKELFNKYGINYQQGDIRALLCEQSDKAFYSSFMALMSLMLQMRNSITGRTDVDFLISPVKNSDGIFYDSRNYEAQENAILPKNADANGAYNIARKVLWAIGQFKKAEDEKLDKVKIAISNKEWLEYAQTSVKHGSKKRRIKQD

SEQ ID NO: 302 - protein, 74 aa, synthetic construct
DHPKYSDMIVAAIQAEKNRAGSSRQSIQKYIKSHYKVGENADSQIKLSIKRLVTTGVLKQTKGVGASGSFRLAK

SEQ ID NO: 303 - protein, 1355 aa, synthetic construct
MAGSKKRRIKQDSKLEKFTNCYSLSKTLRFKAIPVGKTQENIDNKRLLVEDEKRAEDYKGVKKLLDRYYLSFINDVLHSIKLKNLNNYISLFRKKTRTEKENKELENLEINLRKEIAKAFKGNEGYKSLFKKDIIETILPEFLDDKDEIALVNSFNGFTTAFTGFFDNRENMFSEEAKSTSIAFRCINENLTRYISNMDIFEKVDAIFDKHEVQEIKEKILNSDYDVEDFFEGEFFNFVLTQEGIDVYNAIIGGFVTESGEKIKGLNEYINLYNQKTKQKLPKFKPLYKQVLSDRESLSFYGEGYTSDEEVLEVFRNTLNKNSEIFSSIKKLEKLFKNFDEYSSAGIFVKNGPAISTISKDIFGEWNVIRDKWNAEYDDIHLKKKAVVTEKYEDDRRKSFKKIGSFSLEQLQEYADADLSVVEKLKEIIIQKVDEIYKVYGSSEKLFDADFVLEKSLKKNDAVVAIMKDLLDSVKSFENYIKAFFGEGKETNRDESFYGDFVLAYDILLKVDHIYDAIRNYVTQKPYSKDKFKLYFQNPQFMRGWDKDKETDYRATILRYGSKYYLAIMDKKYAKCLQKIDKDDVNGNYEKINYKLLPGPNKMLPRVFFSKKWMAYYNPSEDIQKIYKNGTFKKGDMFNLNDCHKLIDFFKDSISRYPKWSNAYDFNFSETEKYKDIAGFYREVEEQGYKVSFESASKKEVDKLVEEGKLYMFQIYNKDFSDKSHGTPNLHTMYFKLLFDENNHGQIRLSGGAELFMRRASLKKEELVVHPANSPIANKNPDNPKKTTTLSYDVYKDKRFSEDQYELHIPIAINKCPKNIFKINTEVRVLLKHDDNPYVIGIDRGERNLLYIVVVDGKGNIVEQYSLNEIINNFNGIRIKTDYHSLLDKKEKERFEARQNWTSIENIKELKAGYISQVVHKICELVEKYDAVIALEDLNSGFKNSRVKVEKQVYQKFEKMLIDKLNYMVDKKSNPCATGGALKGYQITNKFESFKSMSTQNGFIFYIPAWLTSKIDPSTGFVNLLKTKYTSIADSKKFISSFDRIMYVPEEDLFEFALDYKNFSRTDADYIKKWKLYSYGNRIRIFRNPKKNNVFDWEEVCLTSAYKELFNKYGINYQQGDIRALLCEQSDKAFYSSFMALMSLMLQMRNSITGRTDVDFLISPVKNSDGIFYDSRNYEAQENAILPKNADANGAYNIARKVLWAIGQFKKAEDEKLDKVKIAISNKEWLEYAQTSVKHSGGSSGGSSGSETPGTSESATPESSGGSSGGSDHPKYSDMIVAAIQAEKNRAGSSRQSIQKYIKSHYKVGENADSQIKLSIKRLVTTGVLKQTKGVGASGSFRLAKGSKKRRIKQD

SEQ ID NO: 304 - DNA, 4068 bp, synthetic construct
  source 1..4068: mol_type = other DNA
atggcgggatctaagaagagaagaattaaacaagattcgaagctcgagaagttcaccaactgctactcgctgagcaagacgctgcggttcaaggcgatccccgtcgggaagacccaggagaacatcgacaacaagcggctcctggtcgaggacgagaagcgcgccgaggactacaagggcgtcaagaagctgctggaccggtactacctctccttcatcaacgacgtcctgcactcgatcaagctcaagaacctgaacaactacatctcgctgttccgcaagaagacacggaccgagaaggagaacaaggagctcgagaacctcgagatcaacctgcgcaaggagatcgcgaaggcgttcaagggcaacgaggggtacaagagcctgttcaagaaagacatcatcgagaccatcctgccggagttcctggacgacaaggacgagatcgcgctggtgaactcgttcaacgggttcaccacggccttcaccgggtttttcgacaaccgggagaacatgttcagcgaggaggccaagtcgaccagcatcgccttccggtgcatcaacgagaacctcacccgctacatcagcaacatggacatcttcgagaaggtggacgccatcttcgacaagcacgaggtccaggagatcaaggaaaagatcctgaactcggactacgacgtggaagacttctttgagggcgagttcttcaacttcgtcctcacccaggagggcatcgacgtctacaacgccatcatcggcggcttcgtgacggagagcggcgagaagatcaagggcctcaacgagtacatcaacctctacaaccagaagactaagcagaagctcccgaagttcaagccgctgtacaagcaagtcctgagcgaccgggagtccctctcgttctacggcgagggctacacgagcgacgaggaggtgctggaggtgttccgcaacacgctgaacaagaacagcgagatcttcagctcgatcaagaaactcgagaagctgttcaagaacttcgacgagtacagcagcgccggcatcttcgtcaagaacgggcccgcgatcagcaccatcagcaaggacatcttcggggagtggaacgtgatccgcgacaagtggaacgccgagtacgacgacatccacctcaagaaaaaggcggtggtcacggagaagtacgaggacgaccgccggaagtccttcaagaaaatcgggagcttcagcctcgagcagctccaggagtacgcggacgccgacctgagcgtggtggagaagctcaaggagatcatcatccagaaggtcgacgagatctacaaggtctacggctcgagcgagaagctgttcgacgcggacttcgtgctggagaagtccctcaagaagaacgacgccgtggtggccatcatgaaggatctgctcgacagcgtgaagtcgttcgagaactacatcaaggcattctttggggagggcaaggagacgaaccgggacgagtccttctacggggacttcgtgctcgcgtacgacatcctcctgaaggtcgaccacatctacgacgcgatccggaactacgtcacgcagaagccctacagcaaggacaagttcaagctctacttccagaacccgcagttcatgcgcgggtgggacaaggacaaggagaccgactaccgggccacgatcctgcggtacgggtccaagtactacctcgccatcatggacaagaagtacgccaagtgcctccagaagattgacaaggacgacgtgaacgggaactacgagaagatcaactacaagctcctcccggggcccaacaagatgctgccgagggtgttcttcagcaagaagtggatggcctactacaacccctcggaggacatccagaagatatacaagaacggcacgttcaaaaagggggacatgttcaacctgaacgactgccacaagctgatcgactttttcaaggacagcatcagccgctacccgaagtggtcgaacgcctacgacttcaacttctcggagacggagaagtacaaggacattgcgggcttctaccgggaggtggaggagcagggctacaaggtctccttcgagagcgcctccaagaaagaggtggacaagctcgtggaggagggcaagctgtacatgttccagatctacaacaaggacttctcggacaagtcgcacggcaccccgaacctccacacgatgtacttcaagctgctgttcgacgagaacaaccacgggcagatccgcctcagcggcggggcggagctgttcatgcgccgcgcgtccctcaagaaggaggagctggtcgtgcaccccgccaactccccgatcgcgaacaagaaccccgacaaccccaagaagacaaccaccctctcgtacgacgtctacaaggacaagcggttctcggaggaccagtacgagctgcacatcccgatcgccatcaacaagtgccccaagaacatcttcaagatcaacaccgaggtgcgggtgctgctcaagcacgacgacaacccctacgtcatcgggatcgaccgcggcgagcggaacctgctctacatcgtggtcgtggacgggaaggggaacatcgtggagcagtacagcctgaacgagatcatcaacaacttcaacggcatccgcatcaagacggactaccacagcctcctggacaagaaggagaaggagcggttcgaggcgcggcagaactggacctccatcgagaacatcaaggagctgaaggccggctacatcagccaggtcgtgcacaagatctgcgagctcgtggagaagtacgacgcggtgatcgcgctggaggacttgaacagcgggttcaagaactcccgggtcaaggtcgagaagcaggtctaccagaagttcgagaagatgctgatcgacaagctcaactacatggtggacaagaagtccaacccctgcgccaccggcggcgccctcaagggctaccagatcaccaacaagttcgagtccttcaagtcgatgtctacgcagaacgggttcattttctacatcccggcgtggctcaccagcaagatcgacccgagcacgggcttcgtcaacctcctgaagaccaagtacaccagcatcgcggacagcaagaagttcatctcctcgttcgaccgcatcatgtacgtccccgaggaagacctgttcgagttcgccctcgactacaagaacttctcccggacggacgccgactacatcaaaaagtggaagctctacagctacggcaaccggatccgcatcttccgcaaccccaagaagaacaatgtgttcgactgggaggaggtgtgcctgacgagcgcctacaaggagctcttcaacaagtacggcatcaactaccagcaaggggacatccgcgcgctgctctgcgagcagtccgacaaggcgttctactcgtcgttcatggccctgatgagcctcatgctccagatgcgcaacagcatcaccggccggacggacgtggacttcctgatcagcccggtcaagaacagcgacggcattttctacgacagccggaactacgaggcccaggagaacgccatcctccccaagaacgccgacgcgaacggcgcctacaacatcgcgcggaaggtgctgtgggccatcggccagtttaaaaaggcggaggacgagaagctggacaaggtcaagatcgccatcagcaacaaggagtggctcgagtacgcgcagacgagcgtgaagcactctggaggatctagcggaggatcctctggaagcgagacaccaggcacaagcgagtccgccacaccagagagctccggcggctcctccggaggatccgatcacccgaagtattcggatatgatcgtcgcggcgatccaagctgagaagaaccgggcgggctctagccgccagtcgatccaaaagtacatcaagtcccactacaaggttggggagaacgcggacagtcagatcaagttgagcatcaagcgcctcgtgacaaccggcgtcctcaagcagaccaaaggagtgggcgcgtcggggtcgttccgactcgccaagggatctaagaagagaagaattaaacaagattga

SEQ ID NO: 305 - protein, 1715 aa, synthetic construct
MKRTADGSEFESPKKKRKVSEVEFSHEYWMRHALTLAKRARDEREVPVGAVLVLNNRVIGEGWNRAIGLHDPTAHAEIMALRQGGLVMQNYRLIDATLYVTFEPCVMCAGAMIHSRIGRVVFGVRNSKRGAAGSLMNVLNYPGMNHRVEITEGILADECAALLCDFYRMPRQVFNAQKKAQSSINSGGSSGGSSGSETPGTSESATPESSGGSSGGSDKKYSIGLAIGTNSVGWAVITDEYKVPSKKFKVLGNTDRHSIKKNLIGALLFDSGETAEATRLKRTARRRYTRRKNRICYLQEIFSNEMAKVDDSFFHRLEESFLVEEDKKHERHPIFGNIVDEVAYHEKYPTIYHLRKKLVDSTDKADLRLIYLALAHMIKFRGHFLIEGDLNPDNSDVDKLFIQLVQTYNQLFEENPINASGVDAKAILSARLSKSRRLENLIAQLPGEKKNGLFGNLIALSLGLTPNFKSNFDLAEDAKLQLSKDTYDDDLDNLLAQIGDQYADLFLAAKNLSDAILLSDILRVNTEITKAPLSASMIKRYDEHHQDLTLLKALVRQQLPEKYKEIFFDQSKNGYAGYIDGGASQEEFYKFIKPILEKMDGTEELLVKLNREDLLRKQRTFDNGSIPHQIHLGELHAILRRQEDFYPFLKDNREKIEKILTFRIPYYVGPLARGNSRFAWMTRKSEETITPWNFEEVVDKGASAQSFIERMTNFDKNLPNEKVLPKHSLLYEYFTVYNELTKVKYVTEGMRKPAFLSGEQKKAIVDLLFKTNRKVTVKQLKEDYFKKIECFDSVEISGVEDRFNASLGTYHDLLKIIKDKDFLDNEENEDILEDIVLTLTLFEDREMIEERLKTYAHLFDDKVMKQLKRRRYTGWGRLSRKLINGIRDKQSGKTILDFLKSDGFANRNFMQLIHDDSLTFKEDIQKAQVSGQGDSLHEHIANLAGSPAIKKGILQTVKVVDELVKVMGRHKPENIVIEMARENQTTQKGQKNSRERMKRIEEGIKELGSQILKEHPVENTQLQNEKLYLYYLQNGRDMYVDQELDINRLSDYDVDHIVPQSFLKDDSIDNKVLTRSDKNRGKSDNVPSEEVVKKMKNYWRQLLNAKLITQRKFDNLTKAERGGLSELDKAGFIKRQLVETRQITKHVAQILDSRMNTKYDENDKLIREVKVITLKSKLVSDFRKDFQFYKVREINNYHHAHDAYLNAVVGTALIKKYPKLESEFVYGDYKVYDVRKMIAKSEQEIGKATAKYFFYSNIMNFFKTEITLANGEIRKRPLIETNGETGEIVWDKGRDFATVRKVLSMPQVNIVKKTEVQTGGFSKESILPKRNSDKLIARKKDWDPKKYGGFDSPTVAYSVLVVAKVEKGKSKKLKSVKELLGITIMERSSFEKNPIDFLEAKGYKEVKKDLIIKLPKYSLFELENGRKRMLASAGELQKGNELALPSKYVNFLYLASHYEKLKGSPEDNEQKQLFVEQHKHYLDEIIEQISEFSKRVILADANLDKVLSAYNKHRDKPIREQAENIIHLFTLTNLGAPAAFKYFDTTIDRKRYTSTKEVLDATLIHQSITGLYETRIDLSQLGGDSGGSKRTADGSEFEGSSGGSSGGGSSGSSGGGSGGSGSGGGSGGSDHPKYSDMIVAAIQAEKNRAGSSRQSIQKYIKSHYKVGENADSQIKLSIKRLVTTGVLKQTKGVGASGSFRLAKGSPKKKRKVGSG

SEQ ID NO: 306 - DNA, 5145 bp, synthetic construct
  source 1..5145: mol_type = other DNA
atgaaacggacagccgacggaagcgagttcgagtcaccaaagaagaagcggaaagtctctgaggttgaattttcacatgagtattggatgagacacgctcttaccttggctaagagagcaagggatgagagagaagttccagtgggagcagttcttgtgttgaacaatagagttattggagagggttggaacagggctattggacttcatgatcctactgctcacgcagaaattatggcacttagacaaggtggacttgttatgcagaactacaggcttatcgatgctactctttatgttacattcgagccatgtgtgatgtgcgctggagcaatgattcattctaggattggaagggttgtgttcggtgttagaaactctaagaggggagctgcaggttcacttatgaacgttttgaattatcctggtatgaaccacagagtggagattactgaaggtattttggcagatgaatgtgctgcacttttgtgcgatttttacagaatgcctagacaagtgttcaacgctcaaaagaaggcacaatcttctattaactccggaggatctagcggaggctcctctggctctgagacacctggcacaagcgagagcgcaacacctgaaagcagcgggggcagcagcggggggtcagacaagaagtacagcatcggcctggccatcggcaccaactctgtgggctgggccgtgatcaccgacgagtacaaggtgcccagcaagaaattcaaggtgctgggcaacaccgaccggcacagcatcaagaagaacctgatcggagccctgctgttcgacagcggcgaaacagccgaggccacccggctgaagagaaccgccagaagaagatacaccagacggaagaaccggatctgctatctgcaagagatcttcagcaacgagatggccaaggtggacgacagcttcttccacagactggaagagtccttcctggtggaagaggataagaagcacgagcggcaccccatcttcggcaacatcgtggacgaggtggcctaccacgagaagtaccccaccatctaccacctgagaaagaaactggtggacagcaccgacaaggccgacctgcggctgatctatctggccctggcccacatgatcaagttccggggccacttcctgatcgagggcgacctgaaccccgacaacagcgacgtggacaagctgttcatccagctggtgcagacctacaaccagctgttcgaggaaaaccccatcaacgccagcggcgtggacgccaaggccatcctgtctgccagactgagcaagagcagacggctggaaaatctgatcgcccagctgcccggcgagaagaagaatggcctgttcggaaacctgattgccctgagcctgggcctgacccccaacttcaagagcaacttcgacctggccgaggatgccaaactgcagctgagcaaggacacctacgacgacgacctggacaacctgctggcccagatcggcgaccagtacgccgacctgtttctggccgccaagaacctgtccgacgccatcctgctgagcgacatcctgagagtgaacaccgagatcaccaaggcccccctgagcgcctctatgatcaagagatacgacgagcaccaccaggacctgaccctgctgaaagctctcgtgcggcagcagctgcctgagaagtacaaagagattttcttcgaccagagcaagaacggctacgccggctacattgacggcggagccagccaggaagagttctacaagttcatcaagcccatcctggaaaagatggacggcaccgaggaactgctcgtgaagctgaacagagaggacctgctgcggaagcagcggaccttcgacaacggcagcatcccccaccagatccacctgggagagctgcacgccattctgcggcggcaggaagatttttacccattcctgaaggacaaccgggaaaagatcgagaagatcctgaccttccgcatcccctactacgtgggccctctggccaggggaaacagcagattcgcctggatgaccagaaagagcgaggaaaccatcaccccctggaacttcgaggaagtggtggacaagggcgcttccgcccagagcttcatcgagcggatgaccaacttcgataagaacctgcccaacgagaaggtgctgcccaagcacagcctgctgtacgagtacttcaccgtgtataacgagctgaccaaagtgaaatacgtgaccgagggaatgagaaagcccgccttcctgagcggcgagcagaaaaaggccatcgtggacctgctgttcaagaccaaccggaaagtgaccgtgaagcagctgaaagaggactacttcaagaaaatcgagtgcttcgactccgtggaaatctccggcgtggaagatcggttcaacgcctccctgggcacataccacgatctgctgaaaattatcaaggacaaggacttcctggacaatgaggaaaacgaggacattctggaagatatcgtgctgaccctgacactgtttgaggacagagagatgatcgaggaacggctgaaaacctatgcccacctgttcgacgacaaagtgatgaagcagctgaagcggcggagatacaccggctggggcaggctgagccggaagctgatcaacggcatccgggacaagcagtccggcaagacaatcctggatttcctgaagtccgacggcttcgccaacagaaacttcatgcagctgatccacgacgacagcctgacctttaaagaggacatccagaaagcccaggtgtccggccagggcgatagcctgcacgagcacattgccaatctggccggcagccccgccattaagaagggcatcctgcagacagtgaaggtggtggacgagctcgtgaaagtgatgggccggcacaagcccgagaacatcgtgatcgaaatggccagagagaaccagaccacccagaagggacagaagaacagccgcgagagaatgaagcggatcgaagagggcatcaaagagctgggcagccagatcctgaaagaacaccccgtggaaaacacccagctgcagaacgagaagctgtacctgtactacctgcagaatgggcgggatatgtacgtggaccaggaactggacatcaaccggctgtccgactacgatgtggaccatatcgtgcctcagagctttctgaaggacgactccatcgacaacaaggtgctgaccagaagcgacaagaaccggggcaagagcgacaacgtgccctccgaagaggtcgtgaagaagatgaagaactactggcggcagctgctgaacgccaagctgattacccagagaaagttcgacaatctgaccaaggccgagagaggcggcctgagcgaactggataaggccggcttcatcaagagacagctggtggaaacccggcagatcacaaagcacgtggcacagatcctggactcccggatgaacactaagtacgacgagaatgacaagctgatccgggaagtgaaagtgatcaccctgaagtccaagctggtgtccgatttccggaaggatttccagttttacaaagtgcgcgagatcaacaactaccaccacgcccacgacgcctacctgaacgccgtcgtgggaaccgccctgatcaaaaagtaccctaagctggaaagcgagttcgtgtacggcgactacaaggtgtacgacgtgcggaagatgatcgccaagagcgagcaggaaatcggcaaggctaccgccaagtacttcttctacagcaacatcatgaactttttcaagaccgagattaccctggccaacggcgagatccggaagcggcctctgatcgagacaaacggcgaaaccggggagatcgtgtgggataagggccgggattttgccaccgtgcggaaagtgctgagcatgccccaagtgaatatcgtgaaaaagaccgaggtgcagacaggcggcttcagcaaagagtctatcctgcccaagaggaacagcgataagctgatcgccagaaagaaggactgggaccctaagaagtacggcggcttcgacagccccaccgtggcctattctgtgctggtggtggccaaagtggaaaagggcaagtccaagaaactgaagagtgtgaaagagctgctggggatcaccatcatggaaagaagcagcttcgagaagaatcccatcgactttctggaagccaagggctacaaagaagtgaaaaaggacctgatcatcaagctgcctaagtactccctgttcgagctggaaaacggccggaagagaatgctggcctctgccggcgaactgcagaagggaaacgaactggccctgccctccaaatatgtgaacttcctgtacctggccagccactatgagaagctgaagggctcccccgaggataatgagcagaaacagctgtttgtggaacagcacaagcactacctggacgagatcatcgagcagatcagcgagttctccaagagagtgatcctggccgacgctaatctggacaaagtgctgtccgcctacaacaagcaccgggataagcccatcagagagcaggccgagaatatcatccacctgtttaccctgaccaatctgggagcccctgccgccttcaagtactttgacaccaccatcgaccggaagaggtacaccagcaccaaagaggtgctggacgccaccctgatccaccagagcatcaccggcctgtacgagacacggatcgacctgtctcagctgggaggtgactctggcggctcaaaaagaaccgccgacggcagcgaattcgagggtagttccggcgggtcaagtgggggaggctccagtgggagtagcggaggtggaagtggtggctctggttctggtgggggcagtggggggtccgatcatcccaaatactctgacatgatagtggccgcaatccaagcggaaaaaaatagagccggttccagtaggcagtccattcaaaagtatattaagagtcattacaaagtaggtgagaacgctgactcacagatcaagttgagtatcaaacgcctcgtgacgactggggttcttaaacaaacgaaaggtgtgggagcatcaggatctttcagacttgcaaaaggaagtcccaagaagaagaggaaagtcggaagcgga

SEQ ID NO: 307 - DNA, 5847 bp, synthetic construct
  source 1..5847: mol_type = other DNA
atgaaaagaactgctgatggatctgagtttgaatcacctaagaagaaaaggaaggttgaacccgaggaggagcgtatccgctactcgcaacggttacgcgggactatgagaaggagatacgaggacgacggcatctccgacgacgagatcgaggggaagggttcttctggaggaagcagcggtggtggatcatctggttcatcaggagggggctcggggggaagtggcagtggaggtgggtccggtggctcctcgaagctggaaaagttcaccaactgctactcgctgagcaagacgctgcgcttcaaggcaatccctgtcggcaagacccaggagaacatcgacaacaagcggctgctggtcgaggacgagaagcgagccgaggactacaagggcgtcaagaagttgctcgaccggtactacctcagcttcatcaacgacgtcctgcacagcatcaagctcaagaatctgaacaactacatctccctcttccgcaagaaaacgaggaccgagaaggagaacaaggagctggagaacctggagatcaacctccggaaggagatcgcaaaggcgttcaagggcaacgaggggtacaagtccctattcaagaaggacatcatcgagaccatcctacccgagttcctggacgacaaggacgagatcgcactcgtcaactctttcaacggcttcaccaccgccttcaccgggttcttccggaaccgggagaatatgtttagtgaggaggccaagagtacctccatcgcgttccgctgcatcaacgagaacctgacccgctacatctcgaacatggacatcttcgagaaggtggacgccatcttcgacaagcacgaggtccaggagatcaaggagaaaatcctgaacagcgactacgacgtggaggacttcttcgagggcgagttcttcaacttcgtgcttacgcaagagggcatcgacgtttacaacgccatcatcggagggttcgttacggagtctggcgagaagatcaagggcctgaacgagtacatcaacctgtacaaccagaaaacgaagcaaaagctgcccaagttcaagcccctgtacaagcaagtcctgtccgaccgcgagagcctgagcttctacggggagggcagttctggagagaatcaaacaactcagaaaggacagaagaattcaagggaaagaatgaagagaattgaagaggggataaaagaacttggttctcaaatcttgaaggagcaccccgttgaaaacactcaattgcagaatgagaagctttacctatactatctgcaaaatggaagggacatgtatgtcgaccaagaattggatatcaaccgactttctgattatgatgttgatcatattgtgccacagagcttcttaaaagatgattcaattgataacaaggtattaacgcgtagtgacaagaaccgcgggaaatcagacaatgttccttccgaagaagttgtgaagaaaatgaaaaattattggagacaacttctcaatgcaaagttgataacacagcggaaatttgataacctgaccaaagctgagaggggtggtctctccggctacacctccgacgaggaggtgctggaggtgttccgaaacaccctcaacaagaacagcgagatattcagtagcatcaagaagttggagaagctgttcaagaacttcgacgagtattcctcggcgggcatcttcgtcaagaacggcccggccatatctacgatcagcaaggacatcttcggcgagtggaacgtgatccgcgacaagtggaacgccgagtacgacgacatccaccttaagaagaaggccgtcgtgaccgagaagtacgaggacgaccggcgcaagagcttcaagaaaatcggcagcttcagcctggagcagctccaggagtacgccgacgcggacctgagcgtcgtggagaagttaaaggagatcatcatccagaaggttgacgaaatctacaaggtgtacggctccagcgagaagctgttcgacgcggacttcgtgttggagaaatccctcaagaagaacgacgccgtggtggcgatcatgaaggatctgctggactcggttaagtccttcgagaactacatcaaggcgttcttcggggagggcaaggagaccaaccgggacgagtcgttctatggggacttcgttctggcgtacgacatcctgctcaaggtggaccacatctacgacgccatcaggaactacgtgacccagaagccctactcaaaggacaagttcaagctctacttccagaaccctcagttcatgggcggttgggacaaggataaggagaccgactaccgggccacgatcctgcgctacggctcgaagtattacctggccatcatggacaagaagtatgccaagtgcctccagaaaatcgacaaggacgacgtgaacgggaactacgagaagattaactacaaactgctgccgggcccgaacaagatgcttccgaaggtgttcttcagcaagaagtggatggcgtactacaaccccagcgaggacatccagaaaatctacaagaacggcacgttcaagaagggagatatgttcaacctgaacgactgccataagctcatcgacttcttcaaggactcgatcagccgttaccccaagtggtccaacgcctacgacttcaacttcagcgagaccgagaagtacaaggatatagcgggcttctaccgggaggtcgaggagcaagggtacaaggtttccttcgaaagcgcgtccaagaaggaggtggataagctcgtggaggagggcaagctctatatgttccagatatacaacaaggacttctccgacaagtcacacgggacgccgaacctccacaccatgtacttcaagctcctcttcgatgagaacaaccacggccagattcgcctgtctggaggggcggagctgttcatgcgccgcgcctcgctcaagaaggaggagctggtcgtccacccggccaactcacccatcgccaacaagaaccccgacaaccccaagaaaaccaccaccttgtcttacgatgtgtacaaggacaagcgcttctccgaggaccagtacgaactccacatccccatcgctatcaacaagtgccccaagaacatcttcaagattaacaccgaggtgcgcgtgctcctcaagcacgacgacaacccctacgtgatcggcatcgcgcgcggcgagcgcaacctcctgtacatcgtggtcgtggacggcaagggcaacatcgtcgagcagtattccctgaacgagatcatcaacaacttcaacgggattcgtatcaagacggactaccactcgctgctggacaagaaggagaaggagcggttcgaggcccgtcaaaactggaccagcatcgagaacatcaaggagctgaaagcgggctacatcagccaagtcgtgcacaagatttgcgagcttgtggagaagtacgatgccgtcatagccctggaggatctgaacagcgggttcaagaacagccgagtgaaggtggagaagcaagtctatcagaagttcgagaaaatgctcatcgacaagctcaactacatggtcgataagaagtcaaacccgtgcgccacgggcggggcgctcaagggctaccagatcacgaacaagttcgagagcttcaagtccatgtccacccagaacggcttcatattctacatccccgcctggctaacgagcaagatcgaccccagcaccggcttcgtgaacctgctcaagacgaagtacaccagcatcgccgactccaagaagttcatctcgtcattcgaccggataatgtacgtgcccgaggaggatctgttcgagttcgccctggactacaagaacttctctaggaccgacgccgattacatcaagaagtggaagctctactcttacggcaaccgcatccgcatcttccggaaccccaagaagaacaatgtgttcgactgggaggaggtctgcctgacctccgcgtacaaggagctgttcaacaagtacggcatcaactaccagcaaggggacatccgggccctgctgtgcgagcagtccgacaaagccttctacagcagcttcatggcccttatgtcgctgatgctccagatgaggaactccatcacggggcgcaccgacgtcgatttcctcattagcccggtcaagaactccgacgggatattctacgactcccgcaactacgaggcccaggagaacgccattctgcccaagaacgcggacgcgaacggcgcgtacaacatcgcccggaaggtgctgtgggccatcgggcagttcaagaaggcggaggacgagaagctggataaggtcaagatcgccatcagcaacaaggagtggttggagtacgcccagacgagcgtgaagcacgagagagacaaatcaaagagtagctccaaagatcaacagcagcaagatgaacaacaatatcctcctccaccaccccagaaggattcttcttctgaggttgaattttcacatgagtattggatgagacacgctcttaccttggctaagagagcaagggatgagagagaagttccagtgggagcagttcttgtgttgaacaatagagttattggagagggttggaacagggctattggacttcatgatcctactgctcacgcagaaattatggcacttagacaaggtggacttgttatgcagaactacaggcttatcgatgctactctttatgttacattcgagccatgtgtgatgtgcgctggagcaatgattcattctaggattggaagggttgtgttcggtgttagaaactctaagaggggagctgcaggttcacttatgaacgttttgaattatcctggtatgaaccacagagtggagattactgaaggtattttggcagatgaatgtgctgcacttttgtgcgatttttacagaatgcctagacaagtgttcaacgctcaaaagaaggcacaatcttctattaactctggtgggtcaaaaagaactgctgatggaagtgaatttgagcctaagaagaaaaggaaggttggcagtggcgcgaccaacttttcactactcaaacaggctggggatgttgaagaaaatcctgggcccatggtttcaaaaggagaagagctttttactggtgttgtacctattttggttgagttggatggtgatgttaacggacacaagttcagcgtatcaggggagggagaaggtgatgctacatatggaaaacttactttgaaatttatatgcactactggaaagctccctgtgccatggccaacactcgtcacaacattaacctatggtgtgcagtgtttctcccgctatcctgatcatatgaagcaacatgatttcttcaaatcggcaatgccagagggctatgttcaggagaggacaatattttttaaagatgatggaaactacaagacgcgtgcagaagtgaagtttgaaggagacactcttgtgaaccgaatcgagttgaaggggattgattttaaagaggatgggaacattttaggtcataaactggagtacaattataattcccacaatgtttatatcatggctgacaaacagaagaatggtatcaaggtcaatttcaagattagacataatattgaagatggaagtgttcaacttgccgaccattatcaacaaaacaccccgattggtgacggtcctgtactgctgcccgacaatcattacttgagcactcaatctgccctatctaaggatccaaatgaaaaaagagaccacatggtgcttttagaatttgtgacagctgcagggataaccttgggaatggatgaactttacaaatctggcggctctccaaagaagaaaaggaaagtttga

SEQ ID NO: 308 - protein, 1948 aa, synthetic construct
MKRTADGSEFESPKKKRKVEPEEERIRYSQRLRGTMRRRYEDDGISDDEIEGKGSSGGSSGGGSSGSSGGGSGGSGSGGGSGGSSKLEKFTNCYSLSKTLRFKAIPVGKTQENIDNKRLLVEDEKRAEDYKGVKKLLDRYYLSFINDVLHSIKLKNLNNYISLFRKKTRTEKENKELENLEINLRKEIAKAFKGNEGYKSLFKKDIIETILPEFLDDKDEIALVNSFNGFTTAFTGFFRNRENMFSEEAKSTSIAFRCINENLTRYISNMDIFEKVDAIFDKHEVQEIKEKILNSDYDVEDFFEGEFFNFVLTQEGIDVYNAIIGGFVTESGEKIKGLNEYINLYNQKTKQKLPKFKPLYKQVLSDRESLSFYGEGSSGENQTTQKGQKNSRERMKRIEEGIKELGSQILKEHPVENTQLQNEKLYLYYLQNGRDMYVDQELDINRLSDYDVDHIVPQSFLKDDSIDNKVLTRSDKNRGKSDNVPSEEVVKKMKNYWRQLLNAKLITQRKFDNLTKAERGGLSGYTSDEEVLEVFRNTLNKNSEIFSSIKKLEKLFKNFDEYSSAGIFVKNGPAISTISKDIFGEWNVIRDKWNAEYDDIHLKKKAVVTEKYEDDRRKSFKKIGSFSLEQLQEYADADLSVVEKLKEIIIQKVDEIYKVYGSSEKLFDADFVLEKSLKKNDAVVAIMKDLLDSVKSFENYIKAFFGEGKETNRDESFYGDFVLAYDILLKVDHIYDAIRNYVTQKPYSKDKFKLYFQNPQFMGGWDKDKETDYRATILRYGSKYYLAIMDKKYAKCLQKIDKDDVNGNYEKINYKLLPGPNKMLPKVFFSKKWMAYYNPSEDIQKIYKNGTFKKGDMFNLNDCHKLIDFFKDSISRYPKWSNAYDFNFSETEKYKDIAGFYREVEEQGYKVSFESASKKEVDKLVEEGKLYMFQIYNKDFSDKSHGTPNLHTMYFKLLFDENNHGQIRLSGGAELFMRRASLKKEELVVHPANSPIANKNPDNPKKTTTLSYDVYKDKRFSEDQYELHIPIAINKCPKNIFKINTEVRVLLKHDDNPYVIGIARGERNLLYIVVVDGKGNIVEQYSLNEIINNFNGIRIKTDYHSLLDKKEKERFEARQNWTSIENIKELKAGYISQVVHKICELVEKYDAVIALEDLNSGFKNSRVKVEKQVYQKFEKMLIDKLNYMVDKKSNPCATGGALKGYQITNKFESFKSMSTQNGFIFYIPAWLTSKIDPSTGFVNLLKTKYTSIADSKKFISSFDRIMYVPEEDLFEFALDYKNFSRTDADYIKKWKLYSYGNRIRIFRNPKKNNVFDWEEVCLTSAYKELFNKYGINYQQGDIRALLCEQSDKAFYSSFMALMSLMLQMRNSITGRTDVDFLISPVKNSDGIFYDSRNYEAQENAILPKNADANGAYNIARKVLWAIGQFKKAEDEKLDKVKIAISNKEWLEYAQTSVKHERDKSKSSSKDQQQQDEQQYPPPPPQKDSSSEVEFSHEYWMRHALTLAKRARDEREVPVGAVLVLNNRVIGEGWNRAIGLHDPTAHAEIMALRQGGLVMQNYRLIDATLYVTFEPCVMCAGAMIHSRIGRVVFGVRNSKRGAAGSLMNVLNYPGMNHRVEITEGILADECAALLCDFYRMPRQVFNAQKKAQSSINSGGSKRTADGSEFEPKKKRKVGSGATNFSLLKQAGDVEENPGPMVSKGEELFTGVVPILVELDGDVNGHKFSVSGEGEGDATYGKLTLKFICTTGKLPVPWPTLVTTLTYGVQCFSRYPDHMKQHDFFKSAMPEGYVQERTIFFKDDGNYKTRAEVKFEGDTLVNRIELKGIDFKEDGNILGHKLEYNYNSHNVYIMADKQKNGIKVNFKIRHNIEDGSVQLADHYQQNTPIGDGPVLLPDNHYLSTQSALSKDPNEKRDHMVLLEFVTAAGITLGMDELYKSGGSPKKKRKV
